(19) United States
(12) Patent Application Publication
(10) Pub. No.: US 2024/0366678 A1
(43) Pub. Date: Nov. 7, 2024

(54) EFFECTOR PROTEIN COMPOSITIONS AND METHODS OF USE THEREOF FOR MANUFACTURING ENGINEERED HSCS

(71) Applicant: Mammoth Biosciences, Inc., Brisbane, CA (US)

(72) Inventors: Mark Alan DEWITT, Millbrae, CA (US); Siming XU, Redwood City, CA (US); William Douglass WRIGHT, Fairfield, CA (US); Stepan TYMOSHENKO, Sacramento, CA (US); Benjamin Julius RAUCH, San Francisco, CA (US); Wiputra Jaya HARTONO, San Francisco, CA (US); Aaron DELOUGHERY, San Francisco, CA (US); Lucas Benjamin HARRINGTON, San Francisco, CA (US)

(21) Appl. No.: 18/653,793

(22) Filed: May 2, 2024

Related U.S. Application Data
(60) Provisional application No. 63/500,566, filed on May 5, 2023.
(60) Provisional application No. 63/514,342, filed on Jul. 18, 2023.
(60) Provisional application No. 63/580,980, filed on Sep. 6, 2023.

(51) Int. Cl. A61K 35/28; A61K 31/7105; A61K 38/46; A61K 48/00; C07K 14/00; C12N 5/0789; C12N 9/22; C12N 15/11; C12N 15/86; C12N 15/90

(52) U.S. Cl. CPC A61K 35/28; A61K 31/7105; A61K 38/465; A61K 48/0033; A61K 48/0066; C07K 14/00; C12N 5/0647; C12N 9/22; C12N 15/11; C12N 15/86; C12N 15/907; C12N 2310/20; C12N 2510/00; C12N 2750/14143

(57) ABSTRACT

Provided herein are compositions, systems, and methods for engineering hematopoietic stem cells that engineered by using polypeptides, such as effector proteins, and guide nucleic acids. Also, provided herein are the engineered hematopoietic stem cells, methods of manufacturing such hematopoietic stem cells, and methods of treating a disease or disorder using such hematopoietic stem cells.

### CROSS-REFERENCED APPLICATIONS

[0001] This application claims the benefit of priority to U.S. Provisional Application No. 63/500,566, filed on May 5, 2023, U.S. Provisional Application No. 63/514,342, filed on Jul. 18, 2023, and U.S. Provisional Application No. 63/580,980, filed on Sep. 6, 2023, the entire contents of each of which are incorporated herein by reference.

### INCORPORATION BY REFERENCE OF SEQUENCE LISTING

[0002] The instant application contains a Sequence Listing, which has been submitted via Patent Center. The Sequence Listing titled 203477-786201_US_SL.xml, which was created on May 1, 2024, and is 1,411,352 bytes in size, is hereby incorporated by reference in its entirety.

### FIELD

[0003] The present disclosure relates generally to polypeptides, such as effector proteins, compositions of such polypeptides and guide nucleic acids, systems, and methods of using such polypeptides and compositions, for manufacturing engineered hematopoietic stem cells (HSCs).

### BACKGROUND

[0004] Clustered Regularly Interspaced Short Palindromic Repeats (CRISPR) and associated proteins (Cas proteins), sometimes referred to as a CRISPR/Cas system, were first identified in certain bacterial species and are now understood to form part of a prokaryotic acquired immune system. CRISPR/Cas systems provide immunity in bacteria and archaea against viruses and plasmids by targeting the nucleic acids of the viruses and plasmids in a sequence-specific manner. Native systems contain a CRISPR array, which includes direct repeats flanking short spacer sequences that, in part, guide Cas proteins to their targets. The discovery of CRISPR/Cas systems has revolutionized the field of genomic manipulation and engineering, and therapeutic applications of these systems are being explored.

### SUMMARY

[0005] The present disclosure provides for polypeptides, such as effector proteins, compositions, systems, and methods comprising the same, and uses thereof. In general, compositions, systems, and methods comprise a guide nucleic acid or use thereof. Compositions, systems, and methods disclosed herein may leverage nucleic acid modification activities, such as nucleic acid editing. Editing may comprise: insertion, deletion, substitution, or a combination thereof of one or more nucleotides. In some embodiments, modification activities comprise nucleic acid cleavage activity, e.g., cleavage of a phosphodiester bond between two nucleotides. In some embodiments, compositions, systems and methods are useful for modifying the sequence of a target nucleic acid. In some embodiments, compositions, systems and methods are useful for engineering a hematopoietic stem cell (HSC). In some embodiments, the HSC is used for treating a disease or disorder associated with the target nucleic acid. In some embodiments, the target nucleic acid comprises a human gene. In some embodiments, the target nucleic acid comprises a human gene associated with a genetic blood disease or disorder (e.g., sickle cell anemia, sickle cell disease (SCD), and/or β-thalassemia). In some embodiments, the target nucleic acid comprises a human gene (e.g., HBB gene, BCL11A gene, HBG1 gene, HBG2 gene), or a portion thereof.

### Certain Embodiments

[0006] Provided herein are systems for modifying a target nucleic acid of a hematopoietic stem cell (HSC), the system comprising: (i) a polypeptide, or a nucleic acid encoding the polypeptide, wherein the polypeptide comprises an amino acid sequence that is at least 85% identical to any one of the amino acid sequences set forth in TABLE 1; and (ii) an engineered guide nucleic acid, or a nucleic acid encoding the engineered guide nucleic acid, wherein: (a) the engineered guide nucleic acid comprises a first region and a second region, (b) the polypeptide at least partially binds to the first region to form an RNP complex, (c) the second region comprises a nucleotide sequence that is at least 80% complementary to or at least 80% reverse complementary to a target sequence of the target nucleic acid, (d) the RNP complex, upon hybridization of the second region to the target nucleic, modifies the target nucleic acid of the HSC, (e) the first region and the second region are heterologous to each other, and (f) the HSC following modification by the RNP complex retains at least one of cell viability, cell proliferation, and multi-lineage development potential relative to an unmodified HSC. In some embodiments, the target nucleic acid is within a eukaryotic gene. In some embodiments, the target nucleic acid comprises a nucleotide sequence comprising any one of genes set forth in TABLE 10, a variant thereof or a portion thereof. In some embodiments, the target nucleic acid comprises a nucleotide sequence that is at least 85% identical to any one of the nucleotide sequences set forth in TABLE 11. In some embodiments, the target nucleic acid comprises any one of the following genes: BCL11A, B2M, PNPLA2, CHD4, CIITA, GATA1, HBA, HBA1, HBA2, HBB, HBD, HBE, HBE1, HBG1, HBG2, HBM, HBQ1, HBZ, HOXA9, KLF1, MBD3, MYB, TRAC1, ZBTB7A, a fragment thereof, a promoter thereof, an enhancer thereof, or a combination thereof. In some embodiments, the target nucleic acid comprises any one of the following genes: BCL11A, HBB, HBG1, HBG2, a fragment thereof, a promoter thereof, an enhancer thereof, or a combination thereof. In some embodiments, the HBG gene comprises γ-globin 1 gene (HBG1 gene), γ-globin 2 gene (HBG2 gene), G γ-globin gene, A γ-globin gene, a fragment thereof, a promoter thereof, an enhancer thereof, or a combination thereof. In some embodiments, the target nucleic acid comprises a HBB gene, a fragment thereof, an enhancer thereof or a promoter thereof. In some embodiments, the HBB gene comprises a EV6 mutation. In some embodiments, the target nucleic acid is associated with any one of diseases or disorders set forth in TABLE 12. In some embodiments, the target nucleic acid is associated with a genetic blood disease or disorder. In some embodiments, the target nucleic acid is associated with sickle cell anemia, sickle cell disease (SCD), and/or β-thalassemia. In some embodiments, the target nucleic acid comprises a single nuclear polymorphism (SNP). In some embodiments, the engineered guide nucleic acid comprises a crRNA. In some embodiments, the first region comprises a repeat sequence that at least partially binds to the polypeptide. In some embodiments, the repeat sequence comprises a nucleotide sequence that is at least 85% identical, at least 90% identical, at least 95% identical, or at least 100% identical to any one of the nucleotide sequences set forth in TABLE 5. In some embodiments, the first region comprises a handle sequence that at least partially binds to the polypeptide. In some embodiments, the handle sequence comprises a repeat sequence, an intermediary sequence, a linker, or combinations thereof. In some embodiments, the second region comprises at least 10 contiguous nucleotides that are complementary to a eukaryotic sequence. In some embodiments, the second region comprises at least 10 contiguous nucleotides that are reverse complement of the target sequence. In some embodiments, the second region comprises a spacer sequence that hybridizes to a target sequence of a target nucleic acid, and wherein optionally the spacer sequence comprises any one of the spacer sequences set forth in TABLE 7. In some embodiments, the engineered guide nucleic acid comprises one or more phosphorothioate (PS) backbone modifications, 2′-fluoro (2′-F) sugar modifications, or 2′-O-Methyl (2′OMe) sugar modifications. In some embodiments, the guide nucleic acid comprises a nucleotide sequence that is at least 85% identical to any one of the nucleotide sequences set forth in TABLE 9.

[0007] Also provided herein are systems for modifying a target nucleic acid of a hematopoietic stem cell (HSC) comprising a polypeptide, wherein the polypeptide comprises an amino acid sequence that is at least 90% identical, at least 95% identical, or at least 100% identical to any one of the amino acid sequences set forth in TABLE 1. In some embodiments, the polypeptide comprises a Type V Cas effector protein. In some embodiments, the polypeptide comprises a Cas.265466, a CasPhi.12, or a variant thereof. In some embodiments, the polypeptide comprises binding activity, nuclease activity, nickase activity, base editing activity, cleavage activity, or a combination thereof. In some embodiments, the polypeptide cleaves within or near the target sequence. In some embodiments, the polypeptide cleaves at least one strand of the target nucleic acid. In some embodiments, the polypeptide comprises at least one mutation or amino acid alteration that results in retaining, enhancing or reducing activity relative to corresponding reference amino acid sequence set forth in TABLE 1. In some embodiments, the at least one mutation comprises an amino acid substitution at a position as set forth in TABLE 2 relative to corresponding reference amino acid sequence of TABLE 1. In some embodiments, the polypeptide has nickase activity or nuclease activity. In some embodiments, the polypeptide comprises an effector protein, an effector partner, a fusion protein or a combination thereof. In some embodiments, the effector partner is selected from a polymerase, a deaminase, a reverse transcriptase, a transcriptional repressor, an integrase, a recombinase and a transcriptional activator. In some embodiments, the effector protein is fused to an effector partner, wherein the effector protein and the effector partner are heterologous to each other. In some embodiments, the effector protein is directly fused to N terminus or C terminus of the effector partner by an amide bond. In some embodiments, the polypeptide comprises at least one nuclear localization signal sequence. In some embodiments, the at least one nuclear localization signal sequence independently comprises an amino acid sequence that is identical to any one of nucleotide sequences set forth in TABLE 3. In some embodiments, the polypeptide recognizes a protospacer adjacent motif (PAM). In some embodiments, the polypeptide recognizes a PAM as set forth in TABLE 4. In some embodiments, the polypeptide comprises an amino acid sequence that is at least 90% identical to any one of SEQ ID NO: 1, 569-631. In some embodiments, the polypeptide comprises an amino acid sequence that is at least 90% identical to SEQ ID NO: 1. In some embodiments, the polypeptide comprises an amino acid substitution at position D220R, wherein the polypeptide comprises enhanced nuclease activity. In some embodiments, the engineered guide nucleic acid comprises a sgRNA or a crRNA. In some embodiments, the polypeptide comprises an amino acid sequence that is at least 90% identical to any one of SEQ ID NO: 2, 632-700. In some embodiments, the polypeptide comprises an amino acid sequence that is at least 90% identical to SEQ ID NO: 2. In some embodiments, the polypeptide comprises an amino acid substitution at position L26R, wherein the polypeptide comprises enhanced nuclease activity.

[0008] Also provided herein are systems for modifying a target nucleic acid of a hematopoietic stem cell (HSC) comprising an engineered guide nucleic acid, wherein the system comprises at least two engineered guide nucleic acids selected from: (i) a first engineered guide nucleic acid comprising a spacer sequence that is at least 90% identical or complementary to an equal length portion of a target sequence of a gene encoding the HBB gene, a promoter thereof, an enhancer thereof, or a fragment thereof; (ii) a second engineered guide nucleic acid comprising a spacer sequence that is at least 90% identical or complementary to an equal length portion of a target sequence of a gene encoding the BCL11A gene, a promoter thereof, an enhancer thereof, or a fragment thereof; (iii) a third engineered guide nucleic acid comprising a spacer sequence that is at least 90% identical or complementary to an equal length portion of a target sequence of a gene encoding the HBG1 gene, a promoter thereof, an enhancer thereof, or a fragment thereof; and (iv) a fourth engineered guide nucleic acid comprising a spacer sequence that is at least 90% identical or complementary to an equal length portion of a target sequence of a gene encoding the HBG1 gene, a promoter thereof, an enhancer thereof, or a fragment thereof. In some embodiments, the nucleic acid encoding the polypeptide, the nucleic acid encoding the engineered guide nucleic acid, or both are mRNA. In some embodiments, the systems described herein further comprising a donor nucleic acid, or a nucleic acid encoding a donor nucleic acid. In some embodiments, the donor nucleic acid comprises a nucleotide, a nucleotide sequence, a coding sequence, a gene, an exon, an intron, a gene regulatory region, a fragment thereof, or combinations thereof. In some embodiments, the donor nucleic acid comprises a nucleotide sequence of any one of the following genes: BCL11A, B2M, PNPLA2, CHD4, CIITA, GATA1, HBA, HBA1, HBA2, HBB, HBD, HBE1, HBG, HBG1, HBG2, HBM, HBQ1, HBZ, HOXA9, KLF1, MBD3, MYB, TRAC1, ZBTB7A, a fragment thereof, a promoter thereof, an enhancer thereof, or a combination thereof. In some embodiments, the donor nucleic acid encodes a HBB gene, a BCL11A gene, a HBG1 gene and/or a HBG2 gene, and comprises one or more nucleotide sequences for directing integration into the γ-globin gene. In some embodiments, the systems described herein further comprising an antibody, wherein the antibody is conjugated to one or more components of the system of any one of claims 1-50, and wherein the antibody recognizes and binds HSC. In some embodiments, the antibody recognizes CD34+ and CD117.

[0009] Also provided herein are vectors encoding one or more components of any one of the systems described herein. In some embodiments, the vector further comprises a nucleotide sequence encoding at least one HSC specific promoter. In some embodiments, the vector is a viral vector. In some embodiments, the viral vector is an adeno associated viral (AAV) vector. In some embodiments, the vector is formulated with a lipid or a lipid nanoparticle.

[0010] Also provided herein are libraries of nucleic acid vectors comprising at least one of the vectors described herein, wherein at least one of the vectors described herein is any one of the vectors described herein.

[0011] Also provided herein are pharmaceutical compositions comprising any one of the systems described herein, any one of the vectors described herein, and a pharmaceutically acceptable carrier. In some embodiments, a pharmaceutical composition comprising any one of the engineered HSCs described herein, and a pharmaceutically acceptable carrier.

[0012] Also provided herein are methods of producing an engineered HSC, the method comprising: (i) contacting a target nucleic acid of a HSC with the system of any one of claims 1-54, the vector of any one of claims 55-59, or the pharmaceutical composition of claim 61 for a first sufficient period of time to allow for transfection of the HSC; and (ii) culturing the HSC for a second sufficient period of time for indels to occur in the target nucleic acid for modifying target nucleic acid and, thereby, producing the engineered HSC. In some embodiments, the transfection comprises s electroporation, viral infection, transfection, lipofection, electroporation, calcium phosphate precipitation, direct microinjection, or combinations thereof. In some embodiments, the method is performed in vitro or in vivo. In some embodiments, the target nucleic acid comprises any one of the target nucleic acid sequences set forth in TABLE 10, a fragment thereof, a promoter thereof, an enhancer thereof, a variant thereof or a combination thereof. In some embodiments, the modifying comprises cleaving the target nucleic acid, deleting a nucleic acid of the target nucleic acid, inserting a donor nucleic acid into the target nucleic acid, substituting a nucleic acid of the target nucleic acid with a donor nucleic acid, more than one of the foregoing, or combinations thereof. In some embodiments, the modifying results in upregulation of gene expression, downregulation of gene expression, expression of one or more proteins, or a combination thereof. In some embodiments, the first sufficient time comprises at least about 1 hour, at least about 2 hours, at least about 3 hours, at least about 4 hours, at least about 5 hours or at least about 6 hours. In some embodiments, the second sufficient time at least 1 day, at least 2 days, at least 3 days, at least 4 days, at least 5 days, or at least 6 days. In some embodiments, the method further comprises freezing the HSC. In some embodiments, the method comprises no other agent that alters ability of the engineered HSC to self-renew and/or differentiate into different types of cells.

[0013] Also provided herein are engineered HSCs, wherein any one of the HSCs described herein are modified by any one of the systems or methods of modifying described herein. In some embodiments, the engineered HSCs self-renew and/or differentiate into different types of cells. In some embodiments, the different types of cells comprise a population of hematopoietic stem and progenitor cells (HSPCs), a blood cell, a myeloid cell, a lymphoid cell, a myeloid common progenitor cell, a megakaryocytes-erythrocyte progenitor cell, a granulocytes-macrophages progenitor cell, a monocytic-dendritic progenitor cell, or a lymphoid common progenitor cell.

[0014] Also provided herein are methods of treating a disease or disorder comprising administering any one of the engineered HSCs described herein or any one of the pharmaceutical compositions described herein. In some embodiments, the disease or disorder is any one of the diseases or disorders set forth in TABLE 12.

[0015] Also provided herein are methods of treating a disease or disorder comprising administering a cell modified by a system in a subject in need thereof, wherein the system comprises (a) an engineered guide nucleic acid, or a nucleic acid encoding the engineered guide nucleic acid, wherein (i) the engineered guide nucleic acid comprises a first region and a second region, (ii) the second region comprises a nucleotide sequence that is at least 80% identical to any one of repeat sequences recited in TABLE 5 or intermediary sequences recited in TABLE 8, (iii) the second region comprises a nucleotide sequence that is at least 80% identical to any one of spacer sequences recited in TABLE 7, and (iv) the first region and the second region are heterologous to each other, and (b) a polypeptide, or a nucleic acid encoding the polypeptide, wherein (i) the polypeptide at least partially binds to the first region to form an RNP complex, and (ii) the RNP complex, upon hybridization of the second region to the target nucleic, modifies the target nucleic acid of the cell, wherein the cell comprises a hematopoietic stem cell (HSC), a population of hematopoietic stem and progenitor cells (HSPCs), a blood cell, a myeloid cell, a lymphoid cell, a myeloid common progenitor cell, a megakaryocytes-erythrocyte progenitor cell, a granulocytes-macrophages progenitor cell, a monocytic-dendritic progenitor cell, or a lymphoid common progenitor cell.

### INCORPORATION BY REFERENCE

[0016] All publications, patents, and patent applications mentioned in this specification are herein incorporated by reference to the same extent as if each individual publication, patent, or patent application was specifically and individually indicated to be incorporated by reference.

### BRIEF DESCRIPTION OF THE DRAWINGS

[0017] FIG. 1 shows that the L26R CasPhi. 12 variant (delivered as mRNA via electroporation) can edit a target nucleic acid in hematopoietic stem cells (HSCs).

[0018] FIG. 2 shows indel formation in the promoters of HBG1 and HBG2 in HSCs with wildtype CasPhi. 12 and the L26R CasPhi. 12 variant in a dose dependent study.

[0019] FIG. 3 shows indel formation in the promoters of HBG1 and HBG2 in HSCs with wildtype CasPhi. 12 and the L26R CasPhi. 12 variant.

[0020] FIG. 4A shows hematopoietic stem and progenitor cells (HSPCs) proliferate after electroporation of effector protein (L26R CasPhi. 12 variant) and guide nucleic acid encoding plasmids. FIG. 4B demonstrates HSPC viability by a flow cytometry assay using a viability dye after electroporating plasmids encoding effector proteins and guide nucleic acids. FIG. 4C shows indel activity by the L26R CasPhi.12 variant in a dose dependent manner 4 days after electroporation.

[0021] FIG. 5A shows body weights of NBSGW (NOD.Cg-Kit^{W-41J} Tyr⁺ Prkdc^{scid} I12rg^{im1Wjl}/ThomJ) mice after injection of unedited HSCs in low (220,000 cells) and high (700,000 cells) dose concentrations. FIG. 5B shows baseline spleen weights of NBSGW mice 10 weeks after injection of unedited HSCs in low (220,000 cells) and high (700,000 cells) dose concentrations.

[0022] FIG. 6A shows an increase in the percentage of cells that are human CD45+ in peripheral blood of NBSGW mice 6 weeks after receiving low (220,000 cells) and high (700,000 cells) doses of unedited HSCs relative to baseline. FIG. 6B shows higher populations of human CD45+ cells in NBSGW mouse bone marrow 6 weeks after receiving both low (220,000 cells) and high (700,000 cells) doses of unedited HSCs relative to baseline.

[0023] FIG. 7A shows an increase in the percentage of cells that are human CD45+ in peripheral blood of NBSGW mice 10 weeks after receiving low (220,000 cells) and high (700,000 cells) doses of unedited HSCs relative to baseline. FIG. 7B shows higher populations of human CD45+ cells the blood of NBSGW mice 10 weeks after receiving both low (220,000 cells) and high (700,000 cells) doses of unedited HSCs relative to baseline. FIG. 7C shows higher populations of human CD45+ cells in NBSGW mouse bone marrow 10 weeks after receiving both low (220,000 cells) and high (700,000 cells) doses of unedited HSCs relative to baseline. FIG. 7D shows higher populations of human CD45+ cells in NBSGW mouse spleen 10 weeks after receiving both low (220,000 cells) and high (700,000 cells) doses of unedited HSCs.

[0024] FIG. 8A illustrates an exemplary vector construction for donor nucleic acid integration used in Example 13 for neon system flow cytometry analysis. FIG. 8B shows the relative viability of unedited HSPCs and HSPCs electroporated with the L26R CasPhi. 12 variant. FIG. 8C shows that exposure to increasing doses of AAV6 leads to progressive loss of proliferative potential of HSPCs. FIG. 8D shows 12% GFP integration was obtained with the L26R CasPhi.12 variant using ssAAV6 as a donor template. FIG. 8E shows mean fluorescence intensity as a result of GFP integration with 5 μg L26R CasPhi.12 variant as a function of ssAAV6 concentration.

[0025] FIG. 9A and FIG. 9B show indel activity of CasM.265466 effector protein and guide nucleic acids on the γ-globin gene promoter in HSPCs. FIG. 9A shows % indel generated for guide nucleic acids targeting a target sequence of the HBB gene, the BCL11A gene and the HBG1 promoter. FIG. 9B shows % indel generation of CasM.265466 with guide nucleic acid R11602 (BCL11A Enh-2 targeting).

[0026] FIG. 10 shows % indel of a smaller subset of guides targeting the HBB gene, the BCL11A gene, and the HBG1 promoter with the CasM.265466 effector protein.

[0027] FIG. 11 shows proliferation of HSPCs after electroporation with mRNA encoding CasM.265466 effector protein and R11602 (BCL11A Enh-2 targeting) guide nucleic acid.

[0028] FIG. 12A shows viability of HSPCs electroporated with mRNA encoding CasM.265466 effector protein and guide nucleic acid R11602 (BCL11A Enh-2 targeting). FIG. 12B shows viability of HSPCs electroporated with mRNA encoding a D220R variant of CasM.265466 effector protein and guide nucleic acid R11602 (BCL11A Enh-2 targeting).

[0029] FIG. 13 shows % indel generated with wildtype CasM.265466 effector protein and the D220R CasM.265466 variant in HSPCs from 0 to 5 days post-electroporation.

[0030] FIG. 14A and FIG. 14B shows indel patterns generated by wildtype CasM.265466 effector protein and the D220R CasM.265466 variant, respectively.

[0031] FIG. 15 shows viability of unedited and CasM.265466 effector protein edited HSPCs, wherein HSPCs were subject to a freeze-thaw cycle.

[0032] FIG. 16 shows a proliferation ratio of unedited and CasM.265466 effector protein edited HSPCs, wherein HSPCs were subject to a freeze-thaw cycle.

[0033] FIG. 17 shows total colony forming unit in unedited and CasM.265466 effector protein edited HSPCs, wherein HSPCs were subject to a freeze-thaw cycle.

[0034] FIG. 18 shows % indel observed 5 days post electroporation in unedited and CasM.265466 effector protein edited HSPCs, wherein HSPCs were subject to a freeze-thaw cycle.

[0035] FIG. 19A shows body weight of NBSGW (NOD.Cg-Kit^{W-41J} Tyr Prkdc^{scid} I12rg^{im1Wjl}/ThomJ) mice after injection of CasM.265466 effector protein edited HSPCs in low (220,000 cells) and high (700,000 cells) dose concentrations. FIG. 19B shows the spleen weight of NBSGW mice 10 weeks after injection of edited HSPCs in low (220,000 cells) and high (700,000 cells) dose concentrations. For a negative control, mice were injected with vehicle only.

[0036] FIG. 20A and FIG. 20B show the results of flow cytometry of cells collected from peripheral blood of NBSGW mice 6 weeks post-injection of low (220,000 cells) and high (700,000 cells) doses of CasM.265466 effector protein edited HSPCs. FIG. 20C shows results of negative control for cells collected from peripheral blood, wherein the mice were injected with vehicle only. FIG. 20D summarizes the results of FIGS. 20A-20C showing % hCD45+ cells in harvested white blood cells.

[0037] FIG. 21A and FIG. 21B show the results of flow cytometry of cells collected from peripheral blood of NBSGW mice 10 weeks after an injection of a low (220,000 cells) or high (700,000 cells) dose of CasM.265466 effector protein edited HSPCs. FIG. 21C shows results of negative control for cells collected from peripheral blood, wherein the mice were injected with vehicle only. FIG. 21D and FIG. 21E show the results of flow cytometry of cells collected from bone marrow of NBSGW mice 10 weeks after injection of a low (220,000 cells) or high (700,000 cells) dose of CasM.265466 effector protein edited HSPCs. FIG. 21F shows results of negative control for cells collected from bone marrow, wherein the mice were injected with vehicle only. FIG. 21G and FIG. 21H show the results of flow cytometry of cells collected from spleen of NBSGW mice 10 weeks after injection of a low (220,000 cells) or high (700,000 cells) dose of CasM.265466 effector protein edited HSPCs. FIG. 21I shows results of negative control for cells collected from spleen, wherein the mice were injected with vehicle only. FIG. 21J summarizes the results of FIGS. 21A-21I showing % hCD45+ cells in the collected cells.

[0038] FIG. 22A illustrates an exemplary vector construction for donor nucleic acid integration, used in Example 20 for neon system flow cytometry analysis. FIG. 22B shows a proliferation profile for unedited HSPCs and HSPCs 5 days after electroporation with mRNA encoding CasM.265466 effector proteins and guide nucleic acids, and transduction with AAV6 vector construct at varying dose from 0 to 5×10⁵ MOI, wherein the AAV6 vector construct was engineered according to FIG. 22A. FIG. 22C shows % viability for unedited and HSPCs 1, 5 and 8 days after electroporation with mRNA encoding CasM.265466 effector proteins and guide nucleic acids, and transduction with AAV6 vector construct at varying dose from 0 to 5E5 MOI, wherein the AAV6 vector construct was engineered according to FIG. 22A. FIG. 22D shows % GFP integration observed in unedited and HSPCs 8 days after electroporation with mRNA encoding CasM.265466 effector proteins and guide nucleic acids and AAV6 transduction, wherein AAV6 transduction was performed at a dose varying from 0 to 2E5 MOI. FIG. 22E shows relative fluorescence observed in unedited and HSPCs 8 days after electroporation with mRNA encoding CasM.265466 effector protein and guide nucleic acid, and AAV6 transduction, wherein AAV6 transduction was performed at a dose varying from 0 to 2E5 MOI.

[0039] FIG. 23A shows proliferative potential of frozen HSPCs after electroporation with mRNA encoding a D220R variant of CasM.265466 effector protein and a guide nucleic acid targeting BCL11A, or a L26R variant of CasPhi.12 effector protein and a guide nucleic acid targeting the promoter of HBG1 and HBG2.

[0040] FIG. 23B shows viability of frozen HSPCs after electroporation with mRNA encoding a D220R variant of CasM.265466 effector protein and a guide nucleic acid targeting BCL11A, or a L26R variant of CasPhi. 12 effector protein and a guide nucleic acid targeting the promoter of HBG1 and HBG2.

[0041] FIG. 24 shows indel activity of HSPCs edited using a D220R variant of CasM.265466 effector protein and guide nucleic acid targeting BCL11A, or a L26R variant of CasPhi.12 effector protein and guide nucleic acid targeting the promoter of HBG1 and HBG2, as compared to unedited HSPCs.

[0042] FIG. 25A and FIG. 25B show differentiation potential or multi-lineage development potential of HSPCs edited using a D220R variant of CasM.265466 effector protein and corresponding guide nucleic acid, as compared to unedited HSPCs. Five different densities (e.g., CFU-E or BFU-E, CFU-G, CFU-M, CFU-GM, CFU-GEMM) of HSPCs were plated onto methylcellulose gels for differentiation assay (e.g., CFU assay).

[0043] FIG. 26A shows body weight of NBSGW (NOD.Cg-Kit^{W-41J} Tyr Prkdc^{scid} I12rg^{im1Wjl}/ThomJ) mice after injection of unedited HSCs, HSPCs edited using a D220R variant of CasM.265466 effector protein, or HSPCs edited using a L26R variant of CasPhi.12 effector protein, as compared to uninjected mice.

[0044] FIG. 26B shows the spleen weight of NBSGW mice 12 weeks after injection of unedited HSCs, HSPCs edited using a D220R variant of CasM.265466 effector protein, or HSPCs edited using a L26R variant of CasPhi.12 effector protein, as compared to uninjected mice.

[0045] FIG. 27A shows % of cells that are human CD45+ in peripheral blood of NBSGW mice 6 weeks after injection of unedited HSCs, HSPCs edited using a D220R variant of CasM.265466 effector protein, or HSPCs edited using a L26R variant of CasPhi.12 effector protein, as compared to uninjected mice. Successful HSC engraftment was demonstrated by an increased % of human CD45+ cells in peripheral blood.

[0046] FIG. 27B shows % of cells that are human CD45+ in bone marrow, spleen and peripheral blood of NBSGW mice 12 weeks after injection of unedited HSCs, HSPCs edited using a D220R variant of CasM.265466 effector protein, or HSPCs edited using a L26R variant of CasPhi.12 effector protein, as compared to uninjected mice.

[0047] FIG. 28A shows indel activity of engrafted HSC recruited from NBSGW mice 12 weeks after injection of HSPCs edited using a L26R variant of CasPhi.12 effector protein.

[0048] FIG. 28B shows indel activity of engrafted HSC recruited from NBSGW mice 12 weeks after injection of HSPCs edited using a D220R variant of CasM.265466 effector protein.

[0049] FIG. 29 shows the results of a complete blood count (CBC) test performed using peripheral blood of NBSGW mice 12 weeks after injection of unedited HSCs, HSPCs edited using a D220R variant of CasM.265466 effector protein, or HSPCs edited using a L26R variant of CasPhi.12 effector protein, as compared to uninjected mice.

[0050] FIGS. 30A-30C show exemplary results of indel activity, proliferation rate and viability observed with CasM.265466 effector protein (NanoCas) versus Cas9 from Streptococcus pyogenes (SpCas9) in HSCs post-electroporation.

### DETAILED DESCRIPTION OF THE INVENTION

[0051] It is to be understood that both the foregoing general description and the following detailed description are exemplary, and explanatory only, and are not restrictive of the disclosure.

[0052] The section headings used herein are for organizational purposes only and are not to be construed as limiting the subject matter described.

[0053] All documents, or portions of documents, cited in this application, including, but not limited to, patents, patent applications, articles, books, and treatises, are hereby expressly incorporated by reference in their entirety for any purpose.

### I. Definitions

[0054] Unless otherwise indicated, all technical terms used herein have the same meaning as commonly understood by one of ordinary skill in the art to which this invention belongs. Unless otherwise indicated or obvious from context, the following terms have the following meanings:

[0055] The terms, “a,” “an,” and “the,” as used herein, include plural references unless the context clearly dictates otherwise.

[0056] The terms, “or” and “and/or,” as used herein, include any and all combinations of one or more of the associated listed items.

[0057] The terms, “including,” “includes,” “included,” and other forms, are not limiting.

[0058] The terms, “comprise” and its grammatical equivalents, as used herein, specify the presence of stated features, integers, steps, operations, elements, and/or components, but do not preclude the presence or addition of one or more other features, integers, steps, operations, elements, components, and/or groups thereof.

[0059] The term, “about,” as used herein in reference to a number or range of numbers, is understood to mean the stated number and numbers +/−10% thereof, or 10% below the lower listed limit and 10% above the higher listed limit for the values listed for a range.

[0060] The terms, “% identical,” “% identity,” “percent identity,” and grammatical equivalents thereof, as used herein, in the context of an amino acid sequence or nucleotide sequence, refer to the percent of residues that are identical between respective positions of two sequences when the two sequences are aligned for maximum sequence identity. The % identity is calculated by dividing the total number of the aligned residues by the number of the residues that are identical between the respective positions of the at least two sequences and multiplying by 100. For the purposes of calculating % identity, thymine (T) may be considered the same as uracil (U). Generally, computer programs can be employed for such calculations. Illustrative programs that compare and align pairs of sequences, include ALIGN (Myers and Miller, Comput Appl Biosci. 1988 March; 4 (1): 11-7), FASTA (Pearson and Lipman, Proc Natl Acad Sci USA. 1988 April; 85 (8): 2444-8; Pearson, Methods Enzymol. 1990; 183:63-98) and gapped BLAST (Altschul et al., Nucleic Acids Res. 1997 Sep. 1; 25 (17): 3389-40), BLASTP, BLASTN, or GCG (Devereux et al., Nucleic Acids Res. 1984 Jan. 11; 12 (1 Pt 1): 387-95).

[0061] The terms, “% complementary”, “% complementarity”, “percent complementary”, “percent complementarity” and grammatical equivalents thereof, as used interchangeably herein, in the context of two or more nucleic acid molecules, refer to the percent of nucleotides in two nucleotide sequences in said nucleic acid molecules of equal length that can undergo cumulative base pairing at two or more individual corresponding positions in an antiparallel orientation. Accordingly, the terms include nucleic acid sequences that are not completely complementary over their entire length, which indicates that the two or more nucleic acid molecules include one or more mismatches. A “mismatch” is present at any position in the two opposed nucleotides that are not complementary. The % complementary is calculated by dividing the total number of the complementary residues by the total number of the nucleotides in one of the equal length sequences, and multiplying by 100. Complete or total complementarity describes nucleotide sequences in 100% of the residues of a nucleotide sequence are complementary to residues in a reference nucleotide sequence. “Partially complementarity” describes nucleotide sequences in which at least 20%, but less than 100%, of the residues of a nucleotide sequence are complementary to residues in a reference nucleotide sequence. In some instances, at least 50%, but less than 100%, of the residues of a nucleotide sequence are complementary to residues in a reference nucleotide sequence. In some instances, at least 70%, 80%, 90% or 95%, but less than 100%, of the residues of a nucleotide sequence are complementary to residues in a reference nucleotide sequence. “Noncomplementary” describes nucleotide sequences in which less than 20% of the residues of a nucleotide sequence are complementary to residues in a reference nucleotide sequence.

[0062] The term, “percent similarity,” or “% similarity,” as used herein, in the context of an amino acid sequence, refers to a value that is calculated by dividing a similarity score by the length of the alignment. The similarity of two amino acid sequences can be calculated by using a BLOSUM62 similarity matrix (Henikoff and Henikoff, Proc. Natl. Acad. Sci. USA., 89:10915-10919 (1992)) that is transformed so that any value ≥1 is replaced with +1 and any value ≤0 is replaced with 0. For example, an Ile (I) to Leu (L) substitution is scored at +2.0 by the BLOSUM62 similarity matrix, which in the transformed matrix is scored at +1. This transformation allows the calculation of percent similarity, rather than a similarity score. Alternately, when comparing two full protein sequences, the proteins can be aligned using pairwise MUSCLE alignment. Then, the % similarity can be scored at each residue and divided by the length of the alignment. For determining % similarity over a protein domain or motif, a multilevel consensus sequence (or PROSITE motif sequence) can be used to identify how strongly each domain or motif is conserved. In calculating the similarity of a domain or motif, the second and third levels of the multilevel sequence are treated as equivalent to the top level. Additionally, if a substitution could be treated as conservative with any of the amino acids in that position of the multilevel consensus sequence, +1 point is assigned. For example, given the multilevel consensus sequence: RLG and YCK, the test sequence QIQ would receive three points. This is because in the transformed BLOSUM62 matrix, each combination is scored as: Q-R: +1; Q-Y: +0; I-L: +1; I-C: +0; Q-G: +0; Q-K: +1. For each position, the highest score is used when calculating similarity. The % similarity can also be calculated using commercially available programs, such as the Geneious Prime software given the parameters matrix=BLOSUM62 and threshold ≥1.

[0063] The terms, “bind,” “binding,” “interact” and “interacting,” as used herein, refer to a non-covalent interaction between macromolecules (e.g., between two polypeptides, between a polypeptide and a nucleic acid; between a polypeptide/guide nucleic acid complex and a target nucleic acid; and the like). While in a state of noncovalent interaction, the macromolecules are said to be “associated” or “interacting” or “binding” (e.g., when a molecule X is said to interact with a molecule Y, it is meant the molecule X binds to molecule Y in a non-covalent manner). Non-limiting examples of non-covalent interactions are ionic bonds, hydrogen bonds, van der Waals and hydrophobic interactions. Not all components of a binding interaction need be sequence-specific (e.g., contacts with phosphate residues in a DNA backbone), but some portions of a binding interaction may be sequence-specific.

[0064] The term, “base editor,” as used herein, refers to a polypeptide or fusion protein comprising a base editing activity. The polypeptide with base editing activity may be referred to as an effector partner. The base editor can differ from a naturally occurring base editing enzyme. It is understood that any reference to a base editor herein also refers to a base editing enzyme variant. The base editor is functional when the effector protein is coupled to a guide nucleic acid. The guide nucleic acid imparts sequence specific activity to the base editor. By way of non-limiting example, the effector protein may comprise a catalytically inactive effector protein (e.g., a catalytically inactive variant of an effector protein described herein). Also, by way of non-limiting example, the base editing enzyme comprises deaminase activity.

[0065] The term, “catalytically inactive effector protein,” as used herein, refers to an effector protein that is modified relative to a naturally-occurring effector protein to have a reduced or eliminated catalytic activity relative to that of the naturally-occurring effector protein, but retains its ability to interact with a guide nucleic acid. The catalytic activity that is reduced or eliminated is often a nuclease activity. The naturally-occurring effector protein may be a wildtype protein. In some instances, the catalytically inactive effector protein is referred to as a catalytically inactive variant of an effector protein.

[0066] The term, “cis cleavage,” as used herein, refers to cleavage (hydrolysis of a phosphodiester bond) of a target nucleic acid by a complex of an effector protein and a guide nucleic acid (e.g., an RNP complex), wherein at least a portion of the guide nucleic acid is hybridized to at least a portion of the target nucleic acid. In some instances, cleavage occurs within or directly adjacent to the portion of the target nucleic acid that is hybridized to the portion of the guide nucleic acid.

[0067] The term, “codon optimized,” as used herein, refers to a mutation of a nucleotide sequence encoding a polypeptide, such as a nucleotide sequence encoding an effector protein, to mimic the codon preferences of the intended host organism or cell while encoding the same polypeptide. Thus, the codons can be changed, but the encoded polypeptide remains unchanged. For example, if the intended target cell was a human cell, a human codon-optimized nucleotide sequence encoding an effector protein could be used. As another non-limiting example, if the intended host cell were a mouse cell, then a mouse codon-optimized nucleotide sequence encoding an effector protein could be generated. As another non-limiting example, if the intended host cell were a eukaryotic cell, then a eukaryote codon-optimized nucleotide sequence encoding an effector protein could be generated. As another non-limiting example, if the intended host cell were a prokaryotic cell, then a prokaryote codon-optimized nucleotide sequence encoding an effector protein could be generated. Codon usage tables are readily available, for example, at the “Codon Usage Database” available at www.kazusa.or.jp/codon.

[0068] The terms, “complementary” and “complementarity,” as used herein, in the context of a nucleic acid molecule or nucleotide sequence, refer to the characteristic of a polynucleotide having nucleotides that can undergo cumulative base pairing with their Watson-Crick counterparts (C with G; or A with T) in a reference nucleic acid in antiparallel orientation. For example, when every nucleotide in a polynucleotide or a specified portion thereof forms a base pair with every nucleotide in an equal length sequence of a reference nucleic acid, that polynucleotide is said to be 100% complementary to the sequence of the reference nucleic acid. In a double stranded DNA or RNA sequence, the upper (sense) strand sequence is, in general, understood as going in the direction from its 5′- to 3′-end, and the complementary sequence is thus understood as the sequence of the lower (antisense) strand in the same direction as the upper strand. Following the same logic, the reverse sequence is understood as the sequence of the upper strand in the direction from its 3′- to its 5′-end, while the “reverse complement” sequence or the “reverse complementary” sequence is understood as the sequence of the lower strand in the direction of its 5′- to its 3′-end. Each nucleotide in a double stranded DNA or RNA molecule that is paired with its Watson-Crick counterpart can be referred to as its complementary nucleotide. The complementarity of modified or artificial base pairs can be based on other types of hydrogen bonding and/or hydrophobicity of bases and/or shape complementarity between bases.

[0069] The term, “cleavage assay,” as used herein, refers to an assay designed to visualize, quantitate or identify cleavage of a nucleic acid. In some instances, the cleavage activity comprises cis cleavage activity.

[0070] The terms, “cleave,” “cleaving” and “cleavage,” as used herein, in the context of a nucleic acid molecule or nuclease activity of an effector protein, refer to the hydrolysis of a phosphodiester bond of a nucleic acid molecule that results in breakage of that bond. The result of this breakage can be a nick (hydrolysis of a single phosphodiester bond on one side of a double-stranded molecule), single strand break (hydrolysis of a single phosphodiester bond on a single-stranded molecule) or double strand break (hydrolysis of two phosphodiester bonds on both sides of a double-stranded molecule) depending upon whether the nucleic acid molecule is single-stranded (e.g., ssDNA or ssRNA) or double-stranded (e.g., dsDNA) and the type of nuclease activity being catalyzed by the effector protein.

[0071] The term, “clustered regularly interspaced short palindromic repeats (CRISPR),” as used herein, refers to a segment of DNA found in the genomes of certain prokaryotic organisms, including some bacteria and archaea, that includes repeated short sequences of nucleotides interspersed at regular intervals between unique sequences of nucleotides derived from another organism.

[0072] The term, “conservative substitution,” as used herein, refers to the replacement of one amino acid for another such that the replacement takes place within a family of amino acids that are related in their side chains. Conversely, the term “non-conservative substitution” as used herein refers to the replacement of one amino acid residue for another that does not have a related side chain. Genetically encoded amino acids can be divided into four families having related side chains: (1) acidic (negatively charged): Asp (D), Glu (E); (2) basic (positively charged): Lys (K), Arg (R), His (H); (3) non-polar (hydrophobic): Cys (C), Ala (A), Val (V), Leu (L), Ile (I), Pro (P), Phe (F), Met (M), Trp (W), Gly (G), Tyr (Y), with non-polar also being subdivided into: (i) strongly hydrophobic: Ala (A), Val (V), Leu (L), Ile (I), Met (M), Phe (F); and (ii) moderately hydrophobic: Gly (G), Pro (P), Cys (C), Tyr (Y), Trp (W); and (4) uncharged polar: Asn (N), Gln (Q), Ser(S), Thr (T). Amino acids may be related by aliphatic side chains: Gly (G), Ala (A), Val (V), Leu (L), Ile (I), Ser(S), Thr (T), with Ser(S) and Thr (T) optionally being grouped separately as aliphatic-hydroxyl; Amino acids may be related by aromatic side chains: Phe (F), Tyr (Y), Trp (W). Amino acids may be related by amide side chains: Asn (N), Gln (Q). Amino acids may be related by sulfur-containing side chains: Cys (C) and Met (M).

[0073] The terms, “CRISPR RNA” and “crRNA,” as used herein, refer to a type of guide nucleic acid that is RNA comprising a first sequence that is capable of hybridizing to a target sequence of a target nucleic acid and a second sequence that is capable of interacting with an effector protein either directly (by being bound by an effector protein) or indirectly (e.g., by hybridization with a second nucleic acid molecule that can be bound by an effector). The first sequence and the second sequence are directly connected to each other or by a linker.

[0074] The term, “donor nucleic acid,” as used herein, refers to a nucleic acid that is (designed or intended to be) incorporated into a target nucleic acid or target sequence.

[0075] The term, “edited target nucleic acid,” as used herein, refers to a target nucleic acid, wherein the target nucleic acid has undergone an editing, for example, after contact with an effector protein. In some instances, the editing is an alteration in the sequence of the target nucleic acid. In some instances, the edited target nucleic acid comprises an insertion, deletion, or substitution of one or more nucleotides compared to the unedited target nucleic acid.

[0076] The term, “effector protein,” as used herein, refers to a protein, polypeptide, or peptide that is capable of interacting with a nucleic acid, such as a guide nucleic acid, to form a complex (e.g., a RNP complex), wherein the complex interacts with a target nucleic acid. The term, “effector partner,” as used herein, refers to a protein, polypeptide or peptide that can, in combination with an effector protein and guide nucleic acid, impart some function or activity that can be used to effectuate modification(s) of a target nucleic acid described herein and/or change expression of the target nucleic acid or other nucleic acids associated with the target nucleic acid, when used in connection with compositions, systems, and methods described herein.

[0077] The term, “engineered modification,” as used herein, refers to a structural change of one or more nucleic acid residues of a nucleotide sequence or one or more amino acid residue of an amino acid sequence. The engineered modifications of a nucleotide sequence can include chemical modification of one or more nucleobases, or a chemical change to the phosphate backbone, a nucleotide, a nucleobase or a nucleoside. The engineered modifications can be made to an effector protein amino acid sequence or guide nucleic acid nucleotide sequence, or any sequence disclosed herein (e.g., a nucleic acid encoding an effector protein or a nucleic acid that encodes a guide nucleic acid). Methods of modifying a nucleic acid or amino acid sequence are known. One of ordinary skill in the art will appreciate that the engineered modification(s) may be located at any position(s) of a nucleic acid such that the function of the nucleic acid, protein, composition or system is not substantially decreased. Nucleic acids provided herein can be prepared according to any available technique including, but not limited to chemical synthesis, enzymatic synthesis, which is generally termed in vitro-transcription, cloning, enzymatic, or chemical cleavage, etc. In some instances, the nucleic acids provided herein are not uniformly modified along the entire length of the molecule. Different nucleotide modifications and/or backbone structures can exist at various positions within the nucleic acid.

[0078] The term, “functional domain,” as used herein, refers to a region of one or more amino acids in a protein that is required for an activity of the protein, or the full extent of that activity, as measured in an in vitro assay. Activities include, but are not limited to nucleic acid binding, nucleic acid editing, nucleic acid modifying, nucleic acid cleaving, protein binding. The absence of the functional domain, including mutations of the functional domain, would abolish or reduce activity.

[0079] The term, “functional fragment,” as used herein, refers to a fragment of a protein that retains some function relative to the entire protein. Non-limiting examples of functions are nucleic acid binding, nucleic acid editing, protein binding, nuclease activity, nickase activity, deaminase activity, demethylase activity, integrase activity, recombinase activity or acetylation activity. In some instances, a functional fragment comprises a recognized functional domain, e.g., a catalytic domain.

[0080] The term, “functional protein,” as used herein, refers to protein that retains at least some if not all activity relative to the wildtype protein. A functional protein can also include a protein having enhanced activity relative to the wildtype protein. Assays are known and available for detecting and quantifying protein activity, e.g., colorimetric and fluorescent assays. In some instances, a functional protein is a wildtype protein. In some instances, a functional protein is a functional portion of a wildtype protein.

[0081] The term, “fused,” as used herein, refers to at least two sequences that are connected together, such as by a covalent bond (e.g., an amide bond or a phosphodiester bond) or by a linker. The covalent bond can be formed by a conjugation (e.g., chemical conjugation or enzymatic conjugation) reaction.

[0082] The term, “fusion protein,” as used herein, refers to a protein comprising at least two heterologous polypeptides. In some instances, the fusion protein comprises one or more effector proteins and effector partners. In some instances, an effector protein and effector partner are not found connected to one another as a native protein or complex that occurs together in nature.

[0083] The term, “effector partner,” as used herein, refers to a protein or a fragment thereof that impart some function or activity to the fusion protein that is not provided by the effector protein. In some instances, the effector partner is fused, or linked by a linker, to one or more effector protein. In some instances, the effector partner is not fused or linked to one or more effector protein.

[0084] The term, “genetic disease,” as used herein, refers to a disease, disorder, condition, or syndrome associated with or caused by one or more mutations in the DNA of an organism having the genetic disease.

[0085] The term, “guide nucleic acid,” as used herein, refers to a nucleic acid that, when in a complex with one or more polypeptides described herein (e.g., an RNP complex) can impart sequence selectivity to the complex when the complex interacts with a target nucleic acid. In some instances, a guide nucleic acid is referred to interchangeably as a guide RNA, however it is understood that guide nucleic acids may comprise deoxyribonucleotides (DNA), ribonucleotides (RNA), a combination thereof (e.g., RNA with a thymine base), biochemically or chemically modified nucleobases (e.g., one or more engineered modifications described herein), or combinations thereof.

[0086] The term, “handle sequence,” as used herein, refers to a sequence of nucleotides in a single guide RNA (sgRNA), that is: 1) capable of being non-covalently bound by an effector protein and 2) connects the portion of the sgRNA capable of being non-covalently bound by an effector protein to a nucleotide sequence that is hybridizable to a target nucleic acid. In general, the handle sequence comprises an intermediary sequence, that is capable of being non-covalently bound by an effector protein. In some instances, the handle sequence further comprises a repeat sequence. In such instances, the intermediary sequence or a combination of the intermediary sequence and the repeat sequence is capable of being non-covalently bound by an effector protein.

[0087] The term, “heterologous,” as used herein, refers to at least two different polypeptide sequences that are not found similarly connected to one another in a native nucleic acid or protein. A protein that is heterologous to the effector protein is a protein that is not covalently linked by an amide bond to the effector protein in nature. In some instances, a protein is heterologous when the protein is not encoded by a species that encodes the effector protein. In some instances, a guide nucleic acid comprises “heterologous” sequences, which means that it includes a first nucleotide sequence and a second nucleotide sequence, wherein the first nucleotide sequence and the second nucleotide sequence are not found covalently linked by a phosphodiester bond in nature. Thus, the first nucleotide sequence is considered to be heterologous with the second nucleotide sequence, and, in some instances, the guide nucleic acid is referred to as a heterologous guide nucleic acid. A heterologous system comprises at least one component that is not naturally occurring together with remaining components of the heterologous system.

[0088] The terms, “hybridize,” “hybridizable” and grammatical equivalents thereof, refer to a nucleotide sequence that is able to noncovalently interact, i.e. form Watson-Crick base pairs and/or G/U base pairs, or anneal, to another nucleotide sequence in a sequence-specific, antiparallel, manner (i.e., a nucleotide sequence specifically interacts to a complementary nucleotide sequence) under the appropriate in vitro and/or in vivo conditions of temperature and solution ionic strength. Standard Watson-Crick base-pairing includes: adenine (A) pairing with thymidine (T), adenine (A) pairing with uracil (U), and guanine (G) pairing with cytosine (C) for both DNA and RNA. In addition, for hybridization between two RNA molecules (e.g., dsRNA), and for hybridization of a DNA molecule with an RNA molecule (e.g., when a DNA target nucleic acid base pairs with a guide RNA, etc.): guanine (G) can also base pair with uracil (U). For example, G/U base-pairing is at least partially responsible for the degeneracy (i.e., redundancy) of the genetic code in the context of tRNA anti-codon base-pairing with codons in mRNA. Thus, a guanine (G) can be considered complementary to both an uracil (U) and to an adenine (A). Accordingly, when a G/U base-pair can be made at a given nucleotide position, the position is not considered to be non-complementary, but is instead considered to be complementary. While hybridization typically occurs between two nucleotide sequences that are complementary, mismatches between bases are possible. It is understood that two nucleotide sequences need not be 100% complementary to be specifically hybridizable, hybridizable, partially hybridizable, or for hybridization to occur. Moreover, in some instances, a nucleotide sequence hybridizes over one or more segments such that intervening or adjacent segments are not involved in the hybridization event (e.g., a bulge, a loop structure or hairpin structure, etc.). The conditions appropriate for hybridization between two nucleotide sequences depend on the length of the sequence and the degree of complementarity, variables which are well known in the art. For hybridizations between nucleic acids with short stretches of complementarity (e.g., complementarity over 35 or less, 30 or less, 25 or less, 22 or less, 20 or less, or 18 or less nucleotides) the position of mismatches may become important. Typically, the length for a hybridizable nucleic acid is 8 nucleotides or more (e.g., 10 nucleotides or more, 12 nucleotides or more, 15 nucleotides or more, 20 nucleotides or more, 22 nucleotides or more, 25 nucleotides or more, or 30 nucleotides or more). Any suitable in vitro assay may be utilized to assess whether two sequences “hybridize”. One such assay is a melting point analysis where the greater the degree of complementarity between two nucleotide sequences, the greater the value of the melting temperature (Tm) for hybrids of nucleic acids having those sequences. The conditions of temperature and ionic strength determine the “stringency” of the hybridization. Temperature, wash solution salt concentration, and other conditions may be adjusted as necessary according to factors such as length of the region of complementation and the degree of complementation. Hybridization and washing conditions are well known and exemplified in Sambrook, J. and Russell, W., Molecular Cloning: A Laboratory Manual, Third Edition, Cold Spring Harbor Laboratory Press, Cold Spring Harbor (2001); and in Green, M. and Sambrook, J., Molecular Cloning: A Laboratory Manual, Fourth Edition, Cold Spring Harbor Laboratory Press, Cold Spring Harbor (2012).

[0089] The term, “indel,” as used herein, refers to an insertion-deletion or indel mutation, which is a type of genetic mutation that results from the insertion and/or deletion of one or more nucleotide in a target nucleic acid. An indel can vary in length (e.g., 1 to 1,000 nucleotides in length) and be detected by any suitable method, including sequencing.

[0090] The term, “indel percentage,” as used herein, refers to a percentage of sequencing reads that show at least one nucleotide has been edited from the insertion and/or deletion of nucleotides regardless of the size of insertion or deletion, or number of nucleotides edited. For example, if there is at least one nucleotide deletion detected in a given target nucleic acid, it counts towards the percent indel value. As another example, if one copy of the target nucleic acid has one nucleotide deleted, and another copy of the target nucleic acid has 10 nucleotides deleted, they are counted the same. This number reflects the percentage of target nucleic acids that are edited by a given effector protein.

[0091] The terms, “intermediary RNA” and “intermediary sequence,” as used herein, in a context of a single nucleic acid system, refers to a nucleotide sequence in a handle sequence, wherein the nucleotide sequence is capable of, at least partially, being non-covalently bound to an effector protein to form a complex (e.g., an RNP complex). An intermediary sequence is not a transactivating nucleic acid in systems, methods, and compositions described herein.

[0092] The term, “in vitro,” as used herein, refers to describing something outside an organism. In some instances, an in vitro system, composition or method takes place in a container for holding laboratory reagents such that it is separated from the biological source from which a material in the container is obtained. In vitro assays can encompass cell-based assays in which living or dead cells are employed. In vitro assays can also encompass a cell-free assay in which no intact cells are employed. The term “in vivo” is used to describe an event that takes place within an organism. The term “ex vivo” is used to describe an event that takes place in a cell that has been obtained from an organism. An ex vivo assay is not performed on a subject. Rather, it is performed upon a sample separate from a subject.

[0093] The terms, “length” and “linked” as used herein, refer to a nucleic acid (polynucleotide) or polypeptide, expressed as “kilobases” (kb) or “base pairs (bp)”. Thus, a length of 1 kb refers to a length of 1000 linked nucleotides, and a length of 500 bp refers to a length of 500 linked nucleotides. Similarly, a protein having a length of 500 linked amino acids is simply described as having a length of 500 amino acids.

[0094] The term, “linker,” as used herein, refers to a molecule that links a first polypeptide to a second polypeptide (e.g., by an amide bond) or a first nucleic acid to a second nucleic acid (e.g., by a phosphodiester bond).

[0095] The term, “mutation,” as used herein, refers to an alteration that changes an amino acid residue or a nucleotide as described herein. Such an alteration can include, for example, deletions, insertions, and/or substitutions. The mutation can refer to a change in structure of an amino acid residue or nucleotide relative to the starting or reference residue or nucleotide. A mutation of an amino acid residue includes, for example, deletions, insertions and substituting one amino acid residue for a structurally different amino acid residue. Such substitutions can be a conservative substitution, a non-conservative substitution, a substitution to a specific sub-class of amino acids, or a combination thereof as described herein. A mutation of a nucleotide includes, for example, changing one naturally occurring base for a different naturally occurring base, such as changing an adenine to a thymine or a guanine to a cytosine or an adenine to a cytosine or a guanine to a thymine. In some instances, a mutation of a nucleotide base results in a structural and/or functional alteration of the encoding peptide, polypeptide or protein by changing the encoded amino acid residue of the peptide, polypeptide or protein. In some instances, a mutation of a nucleotide base does not result in an alteration of the amino acid sequence or function of encoded peptide, polypeptide or protein, also known as a silent mutation. Methods of mutating an amino acid residue or a nucleotide are well known.

[0096] The terms, “mutation associated with a disease” and “mutation associated with a genetic disorder,” as used herein, refer to the co-occurrence of a mutation and the phenotype of a disease. In some instances, the mutation occurs in a gene, wherein transcription or translation products from the gene occur at a significantly abnormal level or in an abnormal form in a cell or subject harboring the mutation as compared to a non-disease control subject not having the mutation.

[0097] The term, “nickase,” as used herein, refers to an enzyme that possess catalytic activity for single stranded nucleic acid cleavage of a double stranded nucleic acid.

[0098] The term, “nickase activity,” as used herein, refers to catalytic activity that results in single stranded nucleic acid cleavage of a double stranded nucleic acid.

[0099] The terms, “non-naturally occurring” and “engineered,” as used herein, refer to indicate involvement of the hand of man. The terms, when referring to a nucleic acid, nucleotide, protein, polypeptide, peptide or amino acid, refer to a molecule, such as but not limited to, a nucleic acid, nucleotide, protein, polypeptide, peptide or amino acid refers to a modification of that molecule (e.g., chemical modification, nucleotide sequence, or amino acid sequence) that is not present in the naturally molecule. The terms, when referring to a composition or system described herein, refer to a composition or system having at least one component that is not naturally associated with the other components of the composition or system. By way of a non-limiting example, a composition includes an effector protein and a guide nucleic acid that do not naturally occur together. Conversely, and as a non-limiting further clarifying example, an effector protein or guide nucleic acid that is “natural,” “naturally-occurring,” or “found in nature” includes an effector protein and a guide nucleic acid from a cell or organism that have not been genetically modified by the hand of man.

[0100] The terms, “nuclease” and “endonuclease” as used herein, refer to an enzyme which possesses catalytic activity for nucleic acid cleavage.

[0101] The term, “nuclease activity,” as used herein, refers to catalytic activity that results in nucleic acid cleavage (e.g., ribonuclease activity (ribonucleic acid cleavage), or deoxyribonuclease activity (deoxyribonucleic acid cleavage), etc.).

[0102] The term, “nucleic acid,” as used herein, refers to a polymer of nucleotides. In some instances, a nucleic acid comprises ribonucleotides, deoxyribonucleotides, combinations thereof, and modified versions of the same. In some instances, a nucleic acid is single-stranded or double-stranded, unless specified. Non-limiting examples of nucleic acids are double stranded DNA (dsDNA), single stranded (ssDNA), messenger RNA, genomic DNA, cDNA, DNA-RNA hybrids, and a polymer comprising purine and pyrimidine bases or other natural, chemically or biochemically modified, non-natural, or derivatized nucleotide bases. Accordingly, in some instances, nucleic acids as described herein comprise one or more mutations, one or more engineered modifications, or both.

[0103] The term, “nucleic acid expression vector,” as used herein, refers to a plasmid that can be used to express a nucleic acid of interest.

[0104] The term, “nuclear localization signal (NLS),” as used herein, refers to an entity (e.g., peptide) that facilitates localization of a nucleic acid, protein, or small molecule to the nucleus, when present in a cell that contains a nuclear compartment.

[0105] The terms, “nucleotide(s)” and “nucleoside(s)”, as used herein, in the context of a nucleic acid molecule having multiple residues, refer to describing the sugar and base of the residue contained in the nucleic acid molecule. Similarly, a skilled artisan could understand that linked nucleotides and/or linked nucleosides, as used in the context of a nucleic acid having multiple linked residues, are interchangeable and describe linked sugars and bases of residues contained in a nucleic acid molecule. When referring to a “nucleobase(s)”, or linked nucleobase, as used in the context of a nucleic acid molecule, it can be understood as describing the base of the residue contained in the nucleic acid molecule, for example, the base of a nucleotide, nucleosides, or linked nucleotides or linked nucleosides. A person of ordinary skill in the art when referring to nucleotides, nucleosides, and/or nucleobases would also understand the differences between RNA and DNA (generally the exchange of uridine for thymidine or vice versa) and the presence of nucleoside analogs, such as modified uridines, do not contribute to differences in identity or complementarity among polynucleotides as long as the relevant nucleotides (such as thymidine, uridine, or modified uridine) have the same complement (e.g., adenosine for all of thymidine, uridine, or modified uridine; another example is cytosine and 5-methylcytosine, both of which have guanosine or modified guanosine as a complement). Thus, for example, the sequence 5′-AXG where X is any modified uridine, such as pseudouridine, NI-methyl pseudouridine, or 5-methoxyuridine, is considered 100% identical to AUG in that both are perfectly complementary to the same sequence (5′-CAU).

[0106] The term, “pharmaceutically acceptable excipient, carrier or diluent,” as used herein, refers to any substance formulated alongside the active ingredient of a pharmaceutical composition that allows the active ingredient to retain biological activity and is non-reactive with the subject's immune system. Such a substance can be included for the purpose of long-term stabilization, bulking up solid formulations that contain potent active ingredients in small amounts, or to confer a therapeutic enhancement on the active ingredient in the final dosage form, such as facilitating absorption, reducing viscosity, or enhancing solubility. The selection of appropriate substance can depend upon the route of administration and the dosage form, as well as the active ingredient and other factors. Compositions having such substances can be formulated by suitable methods (see, e.g., Remington's Pharmaceutical Sciences, 18th edition, A. Gennaro, ed., Mack Publishing Co., Easton, Pa., 1990; and Remington, The Science and Practice of Pharmacy 21st Ed. Mack Publishing, 2005).

[0107] The terms, “polypeptide” and “protein,” as used herein, refer to a polymeric form of amino acids. In some instances, a polypeptide includes coded and non-coded amino acids, chemically or biochemically modified or derivatized amino acids, and polypeptides having modified peptide backbones. Accordingly, in some instances, polypeptides as described herein comprise one or more mutations, one or more engineered modifications, or both. It is understood that when describing coding sequences of polypeptides described herein, said coding sequences do not necessarily require a codon encoding an N-terminal Methionine (M) or a Valine (V) as described for the effector proteins described herein. One skilled in the art would understand that a start codon could be replaced or substituted with a start codon that encodes for an amino acid residue sufficient for initiating translation in a host cell. In some instances, when a heterologous peptide, such as an effector partner protein, protein tag or NLS, is located at the N terminus of the effector protein, a start codon for the heterologous peptide serves as a start codon for the effector protein as well. Thus, in some instances, the natural start codon encoding an amino acid residue sufficient for initiating translation (e.g., Methionine (M) or a Valine (V)) of the effector protein is removed or absent.

[0108] The term, “prime editing enzyme”, as used herein, refers to a protein, polypeptide, or fragment thereof that is capable of catalyzing the editing (insertion, deletion, or base-to-base conversion) of a target nucleotide or nucleotide sequence in a nucleic acid.

[0109] The terms, “promoter” and “promoter sequence,” as used herein, refer to a DNA regulatory region capable of binding RNA polymerase and initiating transcription of a downstream (3′ direction) coding or non-coding sequence. A transcription initiation site, as well as protein binding domains responsible for the binding of RNA polymerase, can also be found in a promoter region. Eukaryotic promoters often, but not always, contain “TATA” boxes and “CAT” boxes. In some instances, various promoters, including inducible promoters, are used to drive expression by the various vectors of the present disclosure.

[0110] The terms, “protospacer adjacent motif” and “PAM,” as used herein, refer to a nucleotide sequence found in a target nucleic acid that directs an effector protein to edit the target nucleic acid at a specific location. In some instances, a PAM is required for a complex of an effector protein and a guide nucleic acid (e.g., an RNP complex) to hybridize to and edit the target nucleic acid. In some instances, the complex does not require a PAM to edit the target nucleic acid.

[0111] The term, “REC domain,” as used herein, refers to domain in an α-helical recognition region or lobe. In some instances, an effector protein contains at least one REC domain (e.g., REC1, REC2) which generally helps to accommodate and stabilize the guide nucleic acid and target nucleic acid hybrid.

[0112] The term, “recombinant,” as used herein, in the context of proteins, polypeptides, peptides and nucleic acids, refers to proteins, polypeptides, peptides and nucleic acids that are products of various combinations of cloning, restriction, and/or ligation steps resulting in a construct having a structural coding or non-coding sequence distinguishable from endogenous nucleic acids found in natural systems.

[0113] The term, “regulatory element,” used herein, refers to transcriptional and translational control sequences, such as promoters, enhancers, polyadenylation signals, terminators, protein degradation signals, and the like, that provide for and/or regulate transcription of a non-coding sequence (e.g., a guide nucleic acid) or a coding sequence (e.g., effector proteins, fusion proteins, and the like) and/or regulate translation of an encoded polypeptide.

[0114] The term, “repeat sequence,” as used herein, refers to a sequence of nucleotides in a guide nucleic acid that is capable of, at least partially, interacting with an effector protein.

[0115] The terms, “ribonucleotide protein complex” and “RNP” as used herein, refer to a complex of one or more nucleic acids and one or more polypeptides described herein. While the term utilizes “ribonucleotides,” it is understood that the one or more nucleic acids comprise deoxyribonucleotides (DNA), ribonucleotides (RNA), a combination thereof (e.g., RNA with a thymine base), biochemically or chemically modified nucleobases (e.g., one or more engineered modifications described herein), or combinations thereof.

[0116] The terms, “RuvC” and “RuvC domain,” as used herein, refer to a region of an effector protein that is capable of cleaving a target nucleic acid, and in certain instances, of processing a pre-crRNA. In some instances, the RuvC domain is located near the C-terminus of the effector protein. In some instances, a single RuvC domain comprises RuvC subdomains, for example a RuvCI subdomain, a RuvCII subdomain and a RuvCIII subdomain. The term “RuvC” domain can also refer to a “RuvC-like” domain. Various RuvC-like domains are known in the art and are easily identified using online tools such as InterPro (https://www.ebi.ac.uk/interpro/). For example, in some instances, a RuvC-like domain is a domain which shares homology with a region of TnpB proteins of the IS605 and other related families of transposons.

[0117] The terms, “single guide nucleic acid”, “single guide RNA” and “sgRNA,” as used herein, in the context of a single nucleic acid system, refers to a guide nucleic acid, wherein the guide nucleic acid is a single polynucleotide chain having all the required sequence for a functional complex with an effector protein (e.g., being bound by an effector protein, including in some instances activating the effector protein, and hybridizing to a target nucleic acid, without the need for a second nucleic acid molecule). For example, a sgRNA can have two or more linked guide nucleic acid components (e.g., an intermediary sequence, a repeat sequence, a spacer sequence and optionally a linker, or a handle sequence and a spacer sequence).

[0118] The term, “spacer sequence,” as used herein, refers to a nucleotide sequence in a guide nucleic acid that is capable of, at least partially, hybridizing to an equal length portion of a sequence (e.g., a target sequence) of a target nucleic acid.

[0119] The term, “subject,” as used herein, refers to an animal. In some instances, the subject is a mammal. In some instances, the subject is a human. In some instances, the subject is diagnosed or at risk for a disease.

[0120] The term, “sufficiently complementary,” as used herein, refers to a first nucleotide sequence that is partially complementarity to a second nucleotide sequence while still allowing the first nucleotide sequence to hybridize to the second nucleotide sequence with enough affinity to permit a biological activity to occur. Depending on the context, in some instances, a biological activity comprises the formation of a complex between two or more components described herein, such as an effector protein and a guide nucleic acid. In some instances, a biological activity comprises bringing one or more components described herein into proximity of another component, such as bringing an effector protein-guide nucleic acid complex into proximity of a target nucleic acid. In some instances, a biological activity also comprises permitting a component described herein to act on another component described herein, such as permitting an effector protein to cleave a target nucleic acid. In some instances, sequences are said to be sufficiently complementary when at least 85% of the residues of a nucleotide sequence are complementary to residues in a reference nucleotide sequence.

[0121] The term, “syndrome,” as used herein, refers to a group of symptoms which, taken together, characterize a condition.

[0122] The term, “target nucleic acid,” as used herein, refers to a nucleic acid that is selected as the nucleic acid for editing, binding, hybridization or any other activity of or interaction with a nucleic acid, protein, polypeptide, or peptide described herein. In some instances, target nucleic acid comprises RNA, DNA, or a combination thereof. In some instances, a target nucleic acid is single-stranded (e.g., single-stranded RNA or single-stranded DNA) or double-stranded (e.g., double-stranded DNA).

[0123] The term, “target sequence,” as used herein, in the context of a target nucleic acid, refers to a nucleotide sequence found within a target nucleic acid. Such a nucleotide sequence can, for example, hybridize to a respective length portion of a guide nucleic acid.

[0124] The terms, “target strand” and “TS,” as used herein, in the context of a target nucleic acid being either a single stranded target nucleic acid or a double stranded target nucleic acid, refer to the nucleotide strand that comprises a target sequence to which at least a portion of a guide nucleic acid (e.g., a spacer sequence) is capable of, at least partially, hybridizing to an equal length portion of the target sequence. The terms, “non-target strand” and “NTS,” as used herein, in the context of a target nucleic acid being a double stranded target nucleic acid, refer to the nucleotide strand to which a guide nucleic acid is not capable of hybridizing to. The terms target strand and non-target strand differentiate between the strands of a double stranded target nucleic acid to which a guide nucleic acid is capable of or not capable of hybridizing. Reference may be made to a target sequence present in the target strand or the non-target strand of a double stranded target nucleic acid.

[0125] The term, “transcriptional activator,” as used herein, refers to a polypeptide or a fragment thereof that can activate or increase transcription of a target nucleic acid molecule.

[0126] The term, “transcriptional repressor,” as used herein, refers to a polypeptide or a fragment thereof that is capable of arresting, preventing, or reducing transcription of a target nucleic acid.

[0127] The term, “transgene,” as used herein, refers to a nucleotide sequence that is inserted into a cell for expression of said nucleotide sequence in the cell. A transgene is meant to include (1) a nucleotide sequence that is not naturally found in the cell (e.g., a heterologous nucleotide sequence); (2) a nucleotide sequence that is a mutant form of a nucleotide sequence naturally found in the cell into which it has been introduced; (3) a nucleotide sequence that serves to add additional copies of the same (e.g., exogenous or homologous) or a similar nucleotide sequence naturally occurring in the cell into which it has been introduced; or (4) a silent naturally occurring or homologous nucleotide sequence whose expression is induced in the cell into which it has been introduced. The cell in which transgene expression occurs can be a target cell, such as a host cell.

[0128] The terms, “treatment” and “treating,” as used herein, refer to a pharmaceutical or other intervention regimen for obtaining beneficial or desired results in the recipient. Beneficial or desired results include but are not limited to a therapeutic benefit and/or a prophylactic benefit. In some instances, a therapeutic benefit refers to eradication or amelioration of symptoms or of an underlying disorder being treated. Also, in some instances, a therapeutic benefit is achieved with the eradication or amelioration of one or more of the physiological symptoms associated with the underlying disorder such that an improvement is observed in the subject, notwithstanding that the subject may still be afflicted with the underlying disorder. A prophylactic effect includes delaying, preventing, or eliminating the appearance of a disease or condition, delaying, or eliminating the onset of symptoms of a disease or condition, slowing, halting, or reversing the progression of a disease or condition, or any combination thereof. For prophylactic benefit, in some instances, a subject at risk of developing a particular disease, or to a subject reporting one or more of the physiological symptoms of a disease undergoes treatment, even though a diagnosis of this disease has not been made.

[0129] The term, “variant,” as used herein, refers to a form or version of a protein that differs from the wild-type protein. In some instances, a variant comprises a different function or activity relative to the wild-type protein.

[0130] The term, “viral vector,” as used herein, refers to a nucleic acid to be delivered into a host cell by a recombinantly produced virus or viral particle.

### II. Introduction

[0131] Disclosed herein are compositions, systems, and methods comprising at least one of: (a) a polypeptide or a nucleic acid encoding the polypeptide; and a guide nucleic acid or a nucleic acid encoding the guide nucleic acid. Also disclosed herein are methods of using such compositions and systems for modifying target nucleic acids in a hematopoietic stem cell (HSC). In some embodiments, a reference to the HSC also comprises a population of hematopoietic stem cells and progenitor cells (HSPCs). In some embodiments, the guide nucleic acid is capable of hybridizing to a target sequence of target nucleic acid present in the HSC.

[0132] Polypeptides described herein may bind and, optionally, cleave nucleic acids in a sequence-specific manner. Polypeptides described herein may also cleave the target nucleic acid within a target sequence or at a position adjacent to the target sequence. In some embodiments, a polypeptide is activated when it binds a certain sequence of a nucleic acid described herein, allowing the polypeptide to cleave a region of a target nucleic acid that is near, but not adjacent to the target sequence. A polypeptide may be an effector protein, such as a CRISPR-associated (Cas) protein, which may bind a guide nucleic acid that imparts activity or sequence selectivity to the polypeptide. An effector protein may also be referred to as a programmable nuclease because the nuclease activity of the protein may be directed to different target nucleic acids by way of revising the guide nucleic acid that the protein binds.

[0133] In some embodiments, compositions, systems, and methods comprising guide nucleic acids comprise a first region or nucleotide sequence, at least a portion of which interacts with a polypeptide. In some embodiments, the first nucleotide sequence comprises a sequence that is similar or identical to an intermediary nucleic acid sequence, a handle, a repeat sequence, or a combination thereof. In some embodiments, the guide nucleic acid does not comprise an intermediary nucleic acid. In some embodiments, compositions, systems, and methods comprising guide nucleic acids comprise a second nucleotide sequence that is at least partially complementary to a target nucleic acid, and which, in some embodiments, is referred to as a spacer sequence.

[0134] In some embodiments, effector proteins disclosed herein binds and/or cleaves nucleic acids, including double stranded RNA (dsRNA), single-stranded RNA (ssRNA), double stranded DNA (dsDNA), and single-stranded DNA (ssDNA). In some embodiments, polypeptides disclosed herein provides binding activity, cis cleavage activity, nickase activity, nuclease activity, integrase activity, recombinase activity or a combination thereof.

[0135] The compositions, systems, and methods described herein are non-naturally occurring. In some embodiments, compositions, systems, and methods comprise an engineered guide nucleic acid (also referred to herein as a guide nucleic acid) or a use thereof. In some embodiments, compositions, systems, and methods comprise an engineered protein or a use thereof. In some embodiments, compositions, systems, and methods comprise an isolated polypeptide or a use thereof. In general, compositions, methods, and systems described herein are not found in nature. In some embodiments, compositions, methods, and systems described herein comprise at least one non-naturally occurring component. For example, in some embodiments, disclosed compositions, methods, and systems comprise a guide nucleic acid, wherein the nucleotide sequence of the guide nucleic acid is different or modified from that of a naturally-occurring guide nucleic acid.

[0136] In some embodiments, compositions, systems, and methods comprise at least two components that do not naturally occur together. For example, in some embodiments, disclosed compositions, systems, and methods comprise a guide nucleic acid comprising a first region, at least a portion of which, interacts with a polypeptide, and a second region that is at least partially complementary to a target sequence in a target nucleic acid, wherein the first region and second region do not naturally occur together and/or are heterologous to each other. Also, by way of non-limiting example, in some embodiments, disclosed compositions, systems, and methods comprise a guide nucleic acid and an effector protein that do not naturally occur together. Likewise, by way of non-limiting example, disclosed compositions, systems, and methods comprise a ribonucleotide-protein (RNP) complex comprising an effector protein and a guide nucleic acid that do not occur together in nature. Conversely, and for clarity, an effector protein or guide nucleic acid that is “natural,” “naturally-occurring,” or “found in nature” includes effector proteins and guide nucleic acids from cells or organisms that have not been genetically modified by a human or machine.

[0137] In some embodiments, the guide nucleic acid comprises a non-natural nucleotide sequence. In some embodiments, the non-natural nucleotide sequence is a nucleotide sequence that is not found in nature. In some embodiments, the non-natural nucleotide sequence comprises a portion of a naturally-occurring nucleotide sequence, wherein the portion of the naturally-occurring sequence is not present in nature absent the remainder of the naturally-occurring nucleotide sequence. In some embodiments, the guide nucleic acid comprises two naturally-occurring nucleotide sequences arranged in an order or proximity that is not observed in nature. In some embodiments, compositions and systems comprise a ribonucleotide complex comprising an effector protein and a guide nucleic acid that do not occur together in nature. In some embodiments, compositions and systems comprise at least two components that do not occur together in nature, wherein the at least two components comprise at least one of an effector protein, an effector partner and a guide nucleic acid. In some embodiments, guide nucleic acids comprise a first nucleotide sequence and a second nucleotide sequence that do not occur naturally together. For example, in some embodiments, a guide nucleic acid comprises a naturally-occurring repeat sequence and a spacer sequence that is complementary to a naturally-occurring eukaryotic nucleotide sequence. In some embodiments, the guide nucleic acid comprises a repeat sequence that occurs naturally in an organism and a spacer sequence that does not occur naturally in that organism. In some embodiments, a guide nucleic acid comprises a first nucleotide sequence that occurs in a first organism and a second nucleotide sequence that occurs in a second organism, wherein the first organism and the second organism are different. In some embodiments, the guide nucleic acid comprises a third nucleotide sequence disposed at a 3′ or 5′ end of the guide nucleic acid, or between the first and second nucleotide sequences of the guide nucleic acid. In some embodiments, the guide nucleic acid comprises two heterologous nucleotide sequences arranged in an order or proximity that is not observed in nature. Therefore, compositions and systems described herein are not naturally occurring.

[0138] In some embodiments, compositions, systems, and methods described herein comprise a polypeptide (e.g., an effector protein, an effector partner, a fusion protein, or a combination thereof) that is similar to a naturally occurring polypeptide. In some embodiments, the polypeptide lacks a portion of the naturally occurring polypeptide. In some embodiments, the polypeptide comprises a mutation relative to the naturally-occurring polypeptide, wherein the mutation is not found in nature. In some embodiments, the polypeptide also comprises at least one additional amino acid relative to the naturally-occurring polypeptide. In some embodiments, the polypeptide comprises a heterologous polypeptide. For example, in some embodiments, the polypeptide comprises an addition of a nuclear localization signal relative to the natural occurring polypeptide. In some embodiments, a nucleotide sequence encoding the polypeptide is codon optimized (e.g., for expression in a eukaryotic cell) relative to the naturally occurring sequence.

### III. Polypeptide Systems

[0139] Provided herein are compositions, systems and methods comprising a polypeptide or polypeptide system, wherein the polypeptide or polypeptide system described herein comprises one or more effector proteins or variants thereof, one or more effector partners or variants thereof, one or more linkers for peptides, or combinations thereof.

[0140] Also provided herein are compositions, systems and methods comprising a polypeptide, wherein the polypeptide comprises an effector protein, an effector partner, a fusion protein or a combination thereof.

### Effector Proteins

[0141] Provided herein are compositions, systems, and methods comprising an effector protein or a use thereof. In some embodiments, an effector protein provided herein interacts with a guide nucleic acid to form a complex. In some embodiments, the complex interacts with a target nucleic acid. In some embodiments, an interaction between the complex and a target nucleic acid comprises one or more of: recognition of a protospacer adjacent motif (PAM) sequence within the target nucleic acid by the effector protein, hybridization of the guide nucleic acid to the target nucleic acid, modification of the target nucleic acid by the effector protein, or combinations thereof. In some embodiments, recognition of a PAM sequence within a target nucleic acid directs the modification activity of an effector protein. In some embodiments, recognition of a PAM sequence adjacent to a target sequence of a target nucleic acid directs the modification activity of an effector protein.

[0142] Modification activity of an effector protein or an engineered protein described herein comprises cleavage activity, binding activity, insertion activity, substitution activity, and the like. In some embodiments, modification activity of an effector protein results in: cleavage of at least one strand of a target nucleic acid, deletion of one or more nucleotides of a target nucleic acid, insertion of one or more nucleotides into a target nucleic acid, substitution of one or more nucleotides of a target nucleic acid with an alternative nucleotide, more than one of the foregoing, or any combination thereof. In some embodiments, modification of a target nucleic acid comprises introducing or removing epigenetic modification(s). In some embodiments, an ability of an effector protein to edit a target nucleic acid depends upon the effector protein being complexed with a guide nucleic acid, the guide nucleic acid being hybridized to a target sequence of the target nucleic acid, the distance between the target sequence and a PAM sequence, or combinations thereof. A target nucleic acid comprises a target strand and a non-target strand. Accordingly, in some embodiments, the effector protein edits a target strand and/or a non-target strand of a target nucleic acid.

[0143] The modification of a target nucleic acid generated by an effector protein, as a non-limiting example, results in modulation of the expression of the target nucleic acid (e.g., increasing or decreasing expression of the nucleic acid) or modulation of the activity of a translation product of the target nucleic acid (e.g., inactivation of a protein binding to an RNA molecule or hybridization). Accordingly, in some embodiments, provided herein are methods of editing a target nucleic acid using an effector protein of the present disclosure, or compositions or systems thereof. Also provided herein are methods of modulating expression of a target nucleic acid using an effector protein of the present disclosure, or compositions or systems thereof. Further provided herein are methods of modulating the activity of a translation product of a target nucleic acid using an effector protein of the present disclosure, or compositions or systems thereof.

[0144] In some embodiments, effector proteins disclosed herein provide nucleic acid cleavage activity. In some embodiments, effector proteins provide nuclease activity. In some embodiments, effector proteins provide nickase activity. In general, effector proteins described herein edit a target nucleic acid by cis cleavage activity on the target nucleic acid. In some embodiments, effector proteins disclosed herein comprise a RuvC domain capable of cleavage activity. Effector proteins disclosed herein cleave nucleic acids, including single stranded RNA (ssRNA), double stranded DNA (dsDNA), and single-stranded DNA (ssDNA).

[0145] In some embodiments, effector proteins disclosed herein provide catalytic activity (e.g., nuclease activity) similar to that of a naturally-occurring effector protein, such as, for example, a naturally-occurring effector protein with reduced cleavage activity including cis cleavage activity. In some embodiments, effector proteins disclosed herein are fused to effector partners or fusion proteins wherein the effector partners or fusion proteins are capable of some function or activity not provided by an effector protein.

[0146] In some embodiments, an effector protein comprises a CRISPR-associated (“Cas”) protein. In some embodiments, an effector protein functions as a single protein, including a single protein that is capable of binding to a guide nucleic acid and editing a target nucleic acid. Alternatively, in some embodiments, an effector protein functions as part of a multiprotein complex, including, for example, a complex having two or more effector proteins, including two or more of the same effector proteins (e.g., dimer or multimer). In some embodiments, an effector protein, when functioning in a multiprotein complex, comprises only one functional activity (e.g., binding to a guide nucleic acid), while other effector proteins present in the multiprotein complex are capable of the other functional activity (e.g., editing a target nucleic acid). In some embodiments, an effector protein, when functioning in a multiprotein complex, comprises differing and/or complementary functional activity to other effector proteins in the multiprotein complex. Multimeric complexes, and functions thereof, are described in further detail below. In some embodiments, an effector protein comprises a modified effector protein having increased modification activity and/or increased substrate binding activity (e.g., substrate selectivity, specificity, and/or affinity). Alternatively, or in addition, an effector protein comprises a catalytically inactive effector protein having reduced modification activity or no modification activity.

[0147] TABLE 1 provides illustrative amino acid sequences of effector proteins that are useful in the compositions, systems and methods described herein. In some embodiments, an effector protein, or a recombinant nucleic acid encoding an effector protein, comprises an amino acid sequence that is at least 85% identical to any one of the amino acid sequences set forth in TABLE 1. In some embodiments, the recombinant nucleic acid encoding the effector protein is operably linked to a promoter, wherein the promoter is functional in a eukaryotic cell or a prokaryotic cell. In some embodiments, the promoter is any one or more of: a constitutive promoter, an inducible promoter, a cell type-specific promoter, and a tissue-specific promoter. In some embodiments, the recombinant nucleic acid described herein wherein the promoter is functional in any one of: a plant cell, a fungal cell, an animal cell, cell of an invertebrate, a fly cell, a cell of a vertebrate, a mammalian cell, a primate cell, a non-human primate cell, and a human cell. In some embodiments, the recombinant nucleic acid is a nucleic acid expression vector as described herein.

[0148] In some embodiments, compositions, systems and methods described herein comprise an effector protein, or a nucleic acid encoding the effector protein, wherein the amino acid sequence of the effector protein comprises at least about 200 contiguous amino acids or more of any one of the amino acid sequences recited in TABLE 1. In some embodiments, the amino acid sequence of an effector protein provided herein comprises at least about 200, at least about 220, at least about 240, at least about 260, at least about 280, at least about 300, at least about 320, at least about 340, at least about 360, at least about 380, at least about 400 contiguous amino acids, at least about 420 contiguous amino acids, at least about 440 contiguous amino acids, at least about 460 contiguous amino acids, at least about 480 contiguous amino acids, at least about 500 contiguous amino acids, at least about 520 contiguous amino acids, at least about 540 contiguous amino acids, at least about 560 contiguous amino acids, at least about 580 contiguous amino acids, at least about 600 contiguous amino acids, at least about 620 contiguous amino acids, at least about 640 contiguous amino acids, at least about 660 contiguous amino acids, at least about 680 contiguous amino acids, at least about 700 contiguous amino acids of any one of the amino acid sequences of TABLE 1.

[0149] In some embodiments, compositions, systems and methods described herein comprise an effector protein or a nucleic acid encoding the effector protein, wherein the effector protein comprises a portion of any one of the amino acid sequences recited in TABLE 1. In some embodiments, the effector protein comprises a portion of any one of the amino acid sequences recited in TABLE 1, wherein the portion does not comprise at least the first 10 amino acids, at least the first 20 amino acids, at least the first 40 amino acids, at least the first 60 amino acids, at least the first 80 amino acids, at least the first 100 amino acids, at least the first 120 amino acids, at least the first 140 amino acids, at least the first 160 amino acids, at least the first 180 amino acids, or at least the first 200 amino acids of any one of the amino acid sequences recited in TABLE 1. In some embodiments, the effector protein comprises a portion of any one of the amino acid sequences recited in TABLE 1, wherein the portion does not comprise the last 10 amino acids, the last 20 amino acids, the last 40 amino acids, the last 60 amino acids, the last 80 amino acids, the last 100 amino acids, the last 120 amino acids, the last 140 amino acids, the last 160 amino acids, the last 180 amino acids, or the last 200 amino acids of any one of the amino acid sequences recited in TABLE 1.

[0150] In some embodiments, compositions, systems, and methods described herein comprise an effector protein, or a nucleic acid encoding the effector protein, wherein the effector protein comprises an amino acid sequence that is at least 65%, at least 70%, at least 75%, at least 80%, at least 85%, at least 90%, at least 95%, at least 97%, at least 98%, at least 99%, or 100% identical to any one of the amino acid sequences as set forth in TABLE 1. In some embodiments, an effector protein provided herein comprises an amino acid sequence that is at least 65% identical to any one of the amino acid sequences as set forth in TABLE 1. In some embodiments, an effector protein provided herein comprises an amino acid sequence that is at least 70% identical to any one of the amino acid sequences as set forth in TABLE 1. In some embodiments, an effector protein provided herein comprises an amino acid sequence that is at least 75% identical to any one of the amino acid sequences as set forth in TABLE 1. In some embodiments, an effector protein provided herein comprises an amino acid sequence that is at least 80% identical to any one of the amino acid sequences as set forth in TABLE 1. In some embodiments, an effector protein provided herein comprises an amino acid sequence that is at least 85% identical to any one of the amino acid sequences as set forth in TABLE 1. In some embodiments, an effector protein provided herein comprises an amino acid sequence that is at least 90% identical to any one of the amino acid sequences as set forth in TABLE 1. In some embodiments, an effector protein provided herein comprises an amino acid sequence that is at least 95% identical to any one of the amino acid sequences as set forth in TABLE 1. In some embodiments, an effector protein provided herein comprises an amino acid sequence that is at least 97% identical to any one of the amino acid sequences as set forth in TABLE 1. In some embodiments, an effector protein provided herein comprises an amino acid sequence that is at least 98% identical to any one of the amino acid sequences as set forth in TABLE 1. In some embodiments, an effector protein provided herein comprises an amino acid sequence that is at least 99% identical to any one of the amino acid sequences as set forth in TABLE 1. In some embodiments, an effector protein provided herein comprises an amino acid sequence that is identical to any one of the amino acid sequences as set forth in TABLE 1.

[0151] In some embodiments, compositions, systems, and methods described herein comprise an effector protein, or a nucleic acid encoding the effector protein, wherein the effector protein comprises an amino acid sequence that is at least 80%, at least 85%, at least 90%, at least 95%, at least 97%, at least 98%, at least 99%, or 100% similar to any one of the amino acid sequences as set forth in TABLE 1. In some embodiments, an effector protein provided herein comprises an amino acid sequence that is at least 80% similar to any one of the amino acid sequences as set forth in TABLE 1. In some embodiments, an effector protein provided herein comprises an amino acid sequence that is at least 85% similar to any one of the amino acid sequences as set forth in TABLE 1. In some embodiments, an effector protein provided herein comprises an amino acid sequence that is at least 90% similar to any one of the amino acid sequences as set forth in TABLE 1. In some embodiments, an effector protein provided herein comprises an amino acid sequence that is at least 95% similar to any one of the amino acid sequences as set forth in TABLE 1. In some embodiments, an effector protein provided herein comprises an amino acid sequence that is at least 97% similar to any one of the amino acid sequences as set forth in TABLE 1. In some embodiments, an effector protein provided herein comprises an amino acid sequence that is at least 98% similar to any one of the amino acid sequences as set forth in TABLE 1. In some embodiments, an effector protein provided herein comprises an amino acid sequence that is at least 99% similar to any one of the amino acid sequences as set forth in TABLE 1. In some embodiments, an effector protein provided herein comprises an amino acid sequence that is 100% similar to any one of the amino acid sequences as set forth in TABLE 1.

[0152] In some embodiments, compositions, systems, and methods described herein comprise an effector protein, or a nucleic acid encoding the effector protein, wherein the effector protein comprises one or more amino acid alterations relative to any one of the amino acid sequences recited in TABLE 1. In some embodiments, the one or more alterations comprises at least one, at least two, at least three, at least four, at least five, at least six, at least seven, at least eight, at least nine, at least ten, at least twelve, at least sixteen, at least twenty, or more amino acid alterations relative to any one of the amino acid sequences recited in TABLE 1. In some embodiments, the one or more alterations comprises one to twenty, one to sixteen, one to twelve, one to eight, one to four, four to twenty, four to sixteen, four to twelve, four to eight, eight to twenty, eight to sixteen, eight to twelve, twelve to twenty, twelve to sixteen, or sixteen to twenty amino acid alterations relative to any one of the amino acid sequences recited in TABLE 1. In some embodiments, the one or more alterations comprises one, two, three, four, five, six, seven, eight, nine, ten, or more amino acid alterations relative to any one of the amino acid sequences recited in TABLE 1. In some embodiments, the effector protein comprising one or more amino acid alterations is a variant of an effector protein described herein. It is understood that any reference to an effector protein herein also refers to an effector protein variant as described herein. In some embodiments, the one or more amino acid alterations comprises conservative substitutions, non-conservative substitutions, deletions, or combinations thereof. In some embodiments, an effector protein or a nucleic acid encoding the effector protein comprises 1 amino acid alteration, 2 amino acid alterations, 3 amino acid alterations, 4 amino acid alterations, 5 amino acid alterations, 6 amino acid alterations, 7 amino acid alterations, 8 amino acid alterations, 9 amino acid alterations, 10 amino acid alterations or more relative to any one of the amino acid sequences recited in TABLE 1.

[0153] In some embodiments, compositions, systems, and methods described herein comprise an effector protein, or a nucleic acid encoding the effector protein, wherein the effector protein comprises one or more substitutions relative to any one of the amino acid sequences recited in TABLE 1. In some embodiments, the one or more substitutions comprises at least one, at least two, at least three, at least four, at least five, at least six, at least seven, at least eight, at least nine, at least ten, at least twelve, at least sixteen, at least twenty, or more substitutions relative to any one of the amino acid sequences recited in TABLE 1. In some embodiments, the one or more substitutions comprises one to twenty, one to sixteen, one to twelve, one to eight, one to four, four to twenty, four to sixteen, four to twelve, four to eight, eight to twenty, eight to sixteen, eight to twelve, twelve to twenty, twelve to sixteen, or sixteen to twenty substitutions relative to any one of the amino acid sequences recited in TABLE 1. In some embodiments, the one or more substitutions comprise one, two, three, four, five, six, seven, eight, nine, ten or more substitutions relative to any one of the amino acid sequences recited in TABLE 1. In some embodiments, the one or more substitutions comprise one or more conservative substitutions, one or more non-conservative substitutions, or combinations thereof. As a non-limiting example, a conservative substitution of a basic amino acid of any one of the amino acid sequences recited in TABLE 1 is a substitution by another basic (positively charged) amino acid (e.g., Lys (K), Arg (R), or His (H)). As a non-limiting example, a non-conservative substitution of acidic (negatively charged) amino acid of any one of the amino acid sequences recited in TABLE 1 is a substitution by a basic (positively charged) amino acid (e.g., Lys (K), Arg (R), or His (H)).

[0154] In some embodiments, compositions, systems, and methods described herein comprise an effector protein, or a nucleic acid encoding the effector protein, wherein the effector protein comprises one or more conservative substitutions relative to any one of the amino acid sequences recited in TABLE 1. In some embodiments, the one or more conservative substitutions comprises at least one, at least two, at least three, at least four, at least five, at least six, at least seven, at least eight, at least nine, at least ten, at least twelve, at least sixteen, at least twenty, or more conservative substitutions relative to any one of the amino acid sequences recited in TABLE 1. In some embodiments, the one or more conservative substitutions comprises one to twenty, one to sixteen, one to twelve, one to eight, one to four, four to twenty, four to sixteen, four to twelve, four to eight, eight to twenty, eight to sixteen, eight to twelve, twelve to twenty, twelve to sixteen, or sixteen to twenty conservative substitutions relative to any one of the amino acid sequences recited in TABLE 1. In some embodiments, the one or more conservative substitutions comprise one, two, three, four, five, six, seven, eight, nine, ten or more conservative substitutions relative to any one of the amino acid sequences recited in TABLE 1.

[0155] In some embodiments, compositions, systems, and methods described herein comprise an effector protein, or a nucleic acid encoding the effector protein, wherein the effector protein comprises one or more non-conservative substitutions relative to any one of the amino acid sequences recited in TABLE 1. In some embodiments, the one or more non-conservative substitutions comprises at least one, at least two, at least three, at least four, at least five, at least six, at least seven, at least eight, at least nine, at least ten, at least twelve, at least sixteen, at least twenty, or more non-conservative substitutions relative to any one of the amino acid sequences recited in TABLE 1. In some embodiments, the one or more non-conservative substitutions comprises one to twenty, one to sixteen, one to twelve, one to eight, one to four, four to twenty, four to sixteen, four to twelve, four to eight, eight to twenty, eight to sixteen, eight to twelve, twelve to twenty, twelve to sixteen, or sixteen to twenty non-conservative substitutions relative to any one of the amino acid sequences recited in TABLE 1. In some embodiments, the one or more non-conservative substitutions comprise one, two, three, four, five, six, seven, eight, nine, ten or more non-conservative substitutions relative to any one of the amino acid sequences recited in TABLE 1.

[0156] In some embodiments, an effector protein disclosed herein comprises an amino acid sequence that is at least about 80%, at least about 85%, at least about 90%, at least about 95%, at least about 98%, or at least about 99% identical to any one of the amino acid sequences recited in TABLE 1, wherein all but 1, 2, 3, 4, 5, 6, 7, 8, 9 or 10 amino acids alterations relative to the sequence in TABLE 1 are conservative amino acid substitutions. In some embodiments, an effector protein disclosed herein comprises an amino acid sequence that is at least about 80%, at least about 85%, at least about 90%, at least about 95%, at least about 98%, or at least about 99% identical to any one of the amino acid sequences recited in TABLE 1, wherein all but 1, 2, 3, 4, 5, 6, 7, 8, 9 or 10 amino acids alterations relative to the sequence in TABLE 1 are non-conservative amino acid substitutions. In some embodiments, an effector protein disclosed herein comprises an amino acid sequence that is identical to any one of the amino acid sequences recited in TABLE 1 with the exception of 1, 2, 3, 4, 5, 6, 7, 8, 9 or 10 conservative amino acid alterations. In some embodiments, an effector protein disclosed herein comprises an amino acid sequence that is identical to any one of the amino acid sequences recited in TABLE 1 with the exception of 1, 2, 3, 4, 5, 6, 7, 8, 9 or 10 non-conservative amino acid alterations.

[0157] In some embodiments, an effector protein disclosed herein comprises an amino acid sequence that is at least about 80%, at least about 85%, at least about 90%, at least about 95%, at least about 98%, at least about 99% or 100% similar to any one of the amino acid sequences recited in TABLE 1, wherein all but 1, 2, 3, 4, 5, 6, 7, 8, 9 or 10 amino acids alterations relative to the sequence in TABLE 1 are conservative amino acid substitutions. In some embodiments, an effector protein disclosed herein comprises an amino acid sequence that is at least about 80%, at least about 85%, at least about 90%, at least about 95%, at least about 98%, at least about 99% or 100% similar to any one of the amino acid sequences recited in TABLE 1, wherein all but 1, 2, 3, 4, 5, 6, 7, 8, 9 or 10 amino acids alterations relative to the sequence in TABLE 1 are non-conservative amino acid substitutions. In some embodiments, an effector protein disclosed herein comprises an amino acid sequence that is similar to any one of the amino acid sequences recited in TABLE 1 with the exception of 1, 2, 3, 4, 5, 6, 7, 8, 9 or 10 conservative amino acid alterations. In some embodiments, an effector protein disclosed herein comprises an amino acid sequence that is similar to any one of the amino acid sequences recited in TABLE 1 with the exception of 1, 2, 3, 4, 5, 6, 7, 8, 9 or 10 non-conservative amino acid alterations.

[0158] In some embodiments, the one or more amino acid alterations result in a change in activity of the effector protein relative to a naturally-occurring counterpart (a WT effector protein (e.g., SEQ ID NO: 1 or 2)). For example, and as described in further detail below, the one or more amino acid alteration increases or decreases binding activity of the effector protein relative to a naturally-occurring counterpart. In some embodiments, the one or more amino acid alteration increases or decreases catalytic activity of the effector protein relative to a naturally-occurring counterpart (a WT effector protein (e.g., SEQ ID NO: 1 or 2)). In some embodiments, the one or more amino acid alterations results in a catalytically inactive effector protein variant. In some embodiments, the effector proteins comprising the one or more amino acid alterations can carry out a similar enzymatic reaction as the naturally-occurring counterpart (a WT effector protein (e.g., SEQ ID NO: 1 or 2)).

[0159] In some embodiments, the variants of the effector protein as described herein can include alterations that provide a beneficial characteristic to effector proteins described herein, including but not limited to, increased activity (e.g., indel activity, catalytic activity, specificity or selectivity and/or affinity for a substrate, such as a target nucleic acid and/or a guide nucleic acid). In some embodiments, variants of effector proteins described herein can exhibit an activity that is at least the same or higher than the WT effector protein (e.g., SEQ ID NO: 1 or 2), that is, it has one or more activities that are the same or higher than the effector protein (e.g., SEQ ID NO: 1 or 2) without the variant at the same amino acid position(s). For example, variants can have one or more activity that is at least 10%, at least 20%, at least 30%, at least 40%, at least 50%, at least 60%, at least 70%, at least 80%, at least 90%, at least 100%, at least 110%, at least 120%, at least 130%, at least 140%, at least 150%, at least 160%, at least 170%, at least 180%, at least 190%, or at least 200% higher over a WT effector protein (e.g., SEQ ID NO: 1 or 2). In some embodiments, activity of effector proteins described herein or variants thereof can be measured relative to a WT effector protein (e.g., SEQ ID NO: 1 or 2) in a cleavage assay.

[0160] In some embodiments, the effector proteins described herein comprises a substitution of at least one, at least two, at least three, at least four, at least five, at least six, at least seven, at least eight, at least nine, or at least ten amino acids with positively charged amino acids. In some embodiments, the effector proteins described herein comprises a substitution of one, two, three, four, five, six, seven, eight, nine, or ten amino acids with positively charged amino acids. In some embodiments, the effector protein comprises an amino acid sequence that is at least 65%, at least 70%, at least 75%, at least 80%, at least 85%, at least 90%, at least 95%, at least 98%, at least 99%, or 100% identical to SEQ ID NO: 1, wherein the effector protein comprises one or more amino acid alterations independently at the positions selected from K58, I80, T84, K105, N193, C202, S209, G210, A218, D220, E225, C246, N286, M295, M298, A306, Y315, Q360, or a combination thereof. In some embodiments, the effector protein comprises an amino acid sequence that is at least 60%, at least 65%, at least 70%, at least 75%, at least 80%, at least 85%, at least 90%, at least 92%, at least 95%, at least 97%, at least 98%, at least 99%, or 100% similar to SEQ ID NO: 1, and wherein the effector protein also comprises one or more alterations independently at the positions selected from K58, I80, T84, K105, N193, C202, S209, G210, A218, D220, E225, C246, N286, M295, M298, A306, Y315, Q360, or a combination thereof. In some embodiments, the one or more amino acid alterations comprise one or more substitutions independently selected from K58R, K58K, K58H, I80R, I80K, I80H, T84R, T84K, T84H, K105R, K105K, K105H, N193R, N193K, N193H, C202R, C202K, C202H, S209R, S209K, S209H, G210R, G210K, G210H, A218R, A218K, A218H, D220R, D220K, D220H, E225R, E225K, E225H, C246R, C246K, C246H, N286R, N286K, N286H, M295R, M295K, M295H, M298R, M298K, M298H, A306R, A306K, A306H, Y315R, Y315K, Y315H, Q360R, Q360K, Q360H, N58K, or a combination thereof relative to the amino acid sequence of SEQ ID NO: 1. In some embodiments, the one or more amino acid alterations comprise one or more substitutions independently selected from I80R, T84R, K105R, C202R, G210R, A218R, D220R, E225R, C246R, Q360R, or a combination thereof relative to the amino acid sequence of SEQ ID NO: 1. In some embodiments, the one or more amino acid alterations comprise one or more substitutions independently selected from I80K, T84K, C202K, G210K, A218K, D220K, E225K, C246K, Q360K, or a combination thereof relative to the amino acid sequence of SEQ ID NO: 1. In some embodiments, the one or more amino acid alteration comprises one or more substitutions independently selected from I80H, T84H, K105H, G210H, C202H, A218H, D220H, E225H, C246H, Q360H, or a combination thereof relative to the amino acid sequence of SEQ ID NO: 1. In some embodiments, the one or more amino acid alterations comprise one or more substitutions independently selected from K58W, I80R, T84R, K105R, N193K, C202R, S209F, G210R, A218K, A218R, D220R, E225K, E225R, C246R, N286K, M295W, M298L, A306K, Y315M, Q360R, or a combination thereof relative to the amino acid sequence of SEQ ID NO: 1. In some embodiments, the one or more alterations comprise one or more substitutions independently selected from K58W, I80K, N193K, S209F, A218R, E225K, N286K, M295W, M298L, A306K, Y315M, or a combination thereof relative to the amino acid sequence of SEQ ID NO: 1. In some embodiments, the one or more alterations comprise one or more substitutions independently selected from D237A, D418A, D418N, E335A, and E335Q, or a combination thereof relative to the amino acid sequence of SEQ ID NO: 1. In some embodiments, the one or more amino acid alterations comprise two simultaneous amino acid substitutions selected from D220R/A306K, D220R/K250N, D418A/K58W, and D418N/K58W relative to SEQ ID NO: 1. In some embodiments, the one or more amino acid alterations comprise one or more substitutions relative to SEQ ID NO: 1, wherein the effector protein comprising one or more substitutions has enhanced nuclease activity

[0161] In some embodiments, the effector proteins described herein comprises a substitution of at least one, at least two, at least three, at least four, at least five, at least six, at least seven, at least eight, at least nine, or at least ten amino acids with positively charged amino acids. In some embodiments, the effector proteins described herein comprises a substitution of one, two, three, four, five, six, seven, eight, nine, or ten amino acids with positively charged amino acids. In some embodiments, the effector protein comprises an amino acid sequence that is at least 65%, at least 70%, at least 75%, at least 80%, at least 85%, at least 90%, at least 95%, at least 98%, at least 99%, or 100% identical to SEQ ID NO: 2, wherein the effector protein comprises one or more amino acid alterations independently at the positions selected from I2, T5, K15, R18, H20, S21, L26, N30, E33, E34, A35, K37, K38, R41, N43, Q54, Q79R, K92E, K99R, S108, E109, H110, G111, D113, T114, P116, K118, E119, A121, N132, K135, Q138, V139, L149, E157, E164, E166, E170, Y180, L182, Q183, K184, S186, K189, S196, S198, K200, I203, S205, K206, Y207, H208, N209, Y220, S223, E258, K281, K348, N355, N406, K435, 1471, 1489, Y490, F491, D495, K496, K498, K500, D501, V502, K504, S505, D506, V521, N568, S579, Q612, S638, F701, P707, or any combinations thereof. In some embodiments, the effector protein comprises an amino acid sequence that is at least 65%, at least 70%, at least 75%, at least 80%, at least 85%, at least 90%, at least 95%, at least 98%, at least 99%, or 100% similar to SEQ ID NO: 2, wherein the effector protein comprises one or more amino acid alterations independently at the positions selected from I2, T5, K15, R18, H20, S21, L26, N30, E33, E34, A35, K37, K38, R41, N43, Q54, Q79R, K92E, K99R, S108, E109, H110, G111, D113, T114, P116, K118, E119, A121, N132, K135, Q138, V139, L149, E157, E164, E166, E170, Y180, L182, Q183, K184, S186, K189, S196, S198, K200, 1203, S205, K206, Y207, H208, N209, Y220, S223, E258, K281, K348, N355, N406, K435, 1471, 1489, Y490, F491, D495, K496, K498, K500, D501, V502, K504, S505, D506, V521, N568, S579, Q612, S638, F701, P707, or any combinations thereof. In some embodiments, the one or more amino acid alterations comprise one or more substitutions independently selected from I2R, I2K, I2H, 5K, T5H, T11R, G13R, G13H, G13K, F14R, F14H, F14K, K15R, K15H, L16R, L16H, L16K, L16F, I17R, I17H, I17K, R18H, R18K, R18R, N19R, N19H, N19K, N19V, H20R, H20K, S21R, S21H, S21K, R22H, R22K, R22R, T23R, T23H, T23K, A24R, A24H, A24K, G25R, G25H, G25K, L26H, L28R, L28H, L28K, K29R, K29H, N30R, N30H, N30K, E31R, E31H, E31K, G32R, G32H, G32K, E33R, E33H, E33K, E34R, E34H, E34K, A35R, A35H, A35K, C36R, C36H, C36K, K37R, K37H, K38R, K38H, F39R, F39H, F39K, V40R, V40H, V40K, R41H, R41K, R41R, E42R, E42H, E42K, N43R, N43H, N43K, N43A, E44R, E44H, E44K, P46S, D48Y, C50K, C50P, P51R, P51H, P51K, N52R, N52H, N52K, F53R, F53H, F53K, F509A, Q54H, Q54K, G55R, G55H, G55K, G56R, G56H, G56K, P57R, P57H, P57K, A58W, A58F, 159K, I59R, I62K, K65W, K65F, E68P, T70E, E71K, E73W, E73F, E73P, 174W, 174F, Y75W, Y75F, S77V, S78K, S78D, L79R, A80K, E83K, V84Y, V84K, T87G, T87D, P89T, P89K, K90E, P94E, P94Q, P94K, E95K, P96K, 197R, K99R, K99H, K99S, E100K, E101K, W102T, W106N, W106K, L107F, S108R, S108H, S108K, E109R, E109H, E109K, E109A, H110R, H110K, H110T, G111R, G111H, G111K, L112R, L112H, L112K, L112E, D113R, D113H, D113K, T114R, T114H, T114K, V115R, V115H, V115K, P116R, P116H, P116K, P116G, Y117R, Y117H, Y117K, K118R, K118H, E119R, E119H, E119K, A120R, A120H, A120K, A121R, A121H, A121K, G122R, G122H, G122K, L123R, L123H, L123K, N124R, N124H, N124K, L125R, L125H, L125K, 1126R, 1126H, 1126K, 1127R, 1127H, 1127K, K128R, K128H, N129R, N129H, N129K, A130R, A130H, A130K, V131R, V131H, V131K, N132R, N132H, N132K, T133R, T133H, T133K, Y134R, Y134H, Y134K, K135R, K135H, G136R, G136H, G136K, V137R, V137H, V137K, Q138R, Q138H, Q138K, V139H, V139K, K146N, N147K, N148E, L149R, L149H, L149K, A150K, K151E, N153R, E157R, I158K, A159K, A159N, K160D, G163E, S168W, F169F, E171K, F175K, G179R, G179H, G179K, Y180R, Y180H, Y180K, L181R, L181H, L181K, L182R, L182H, L182K, Q183R, Q183H, Q183K, K184R, K184H, K184P, P185R, P185H, P185K, S186H, S186K, S186G, S186E, S186R, P187R, P187H, P187K, P187I, N188R, N188H, N188K, K189R, K189H, S190R, S190H, S190K, S190V, I191R, I191H, I191K, Y192R, Y192H, Y192K, C193R, C193H, C193K, Y194R, Y194H, Y194K, Q195R, Q195H, Q195K, S196R, S196H, S196K, V197R, V197H, V197K, S198H, S198K, S198E, P199R, P199H, P199K, K200R, K200H, P201R, P201H, P201K, F202R, F202H, F202K, I203R, I203H, I203K, I203G, T204R, T204H, T204K, S205R, S205H, S205K, K206R, K206H, Y207R, Y207H, Y207K, H208R, H208K, N209R, N209H, N209K, N209D, N209W, N209F, V210R, V210H, V210K, G218S, G218K, Y220K, S223K, S223V, E225K, I227R, V228R, S229R, P230R, Y231K, Y231G, Y231R, Q232R, F233R, D234R, L236R, I238R, P239R, I240K, G241R, E242R, P243R, G244R, Y245R, V246K, V246R, P247R, K248E, K248R, Q250N, Q250R, T252D, T252R, F253R, L254R, S255R, K256E, K256R, K257R, E258R, N259R, K260R, R262D, L264R, S265R, K266R, I268R, S272Q, P273A, G276V, C279R, I280K, K281R, K281H, C285V, V286K, T295N, T295F, T295W, H297A, H297R, W298L, Y301L, H302F, H302W, P304E, P304K, D306K, D306F, L311T, F312L, F315M, F315K, T316R, T316H, T316K, V328N, R329T, M334E, 1338S, N340S, N340F, K348R, K348H, N355R, N355H, N355K, 1356W, 1356F, C357L, C357E, C357K, N360K, G361R, C363V, A366V, V368K, V370L, K384T, L390H, T391W, K392A, K392E, T393K, T393E, 1395Q, R397K, P399F, P399Q, T400L, C405L, C405R, K407E, F445S, S472R, K480L, V483G, G497K, G497R, D501K, M503K, W509A, Q511R, Q511H, Q511K, D512R, D512H, D512K, Y513R, Y513H, Y513K, K514R, K514H, P515R, P515H, P515K, K516R, K516H, L517R, L517H, L517K, D523K, S526N, E529K, E529L, E536A, R531E, S536A, N540R, N540H, N540K, K541R, K541H, L542R, L542H, L542K, S543R, S543H, S543K, K544R, K544H, S545R, S545H, S545K, R546H, R546K, R546R, D549L, G577H, G585R, Y590R, Y590H, Y590K, K591R, K591H, P592R, P592H, P592K, K593R, K593H, K594R, K594H, E595R, E595H, E595K, N596R, N596H, N596K, W599F, A602R, A602H, A602K, I603R, 1603H, 1603K, H604R, H604K, K605R, K605H, A606R, A606H, A606K, L607R, L607H, L607K, L607F, T608R, T608H, T608K, Q612R, R617Y, L620E, M624A, K634G, K639E, I653A, A673G, A673R, Q674R, Q674K, K678R, P679R, E682R, S684R, G685R, A696R, P699R, D703R, P707H, P707K, Y709R, E715R, A716R, K15K, H20H, K37K, K38K, Q79K, Q79H, K92R, K92K, K92H, K99K, H110H, K118K, K135K, N148R, N148K, N148H, E157K, E157H, E164R, E164K, E164H, E166R, E166K, E166H, E170R, E170K, E170H, K184K, K189K, K200K, K206K, H208H, Y220R, Y220H, S223R, S223H, E258H, K281K, K348K, S362R, S362K, S362H, N406R, N406H, K435R, K435K, K435H, I471R, I471K, I471H, 1489R, 1489K, 1489H, Y490R, Y490K, Y490H, F491R, F491K, F491H, D495R, D495K, D495H, K496R, K496K, K496H, K498R, K498K, K498H, K500R, K500K, K500H, D501R, D501H, V502R, V502K, V502H, K504R, K504K, K504H, S505R, S505K, S505H, D506R, D506K, D506H, V521R, V521K, V521H, N568R, N568K, N568H, S579K, S579H, Q612K, Q612H, S638R, S638H, F701K, F701H, or any combinations thereof relative to the amino acid sequence of SEQ ID NO: 2. In some embodiments, the one or more amino acid alterations comprise one or more substitutions independently selected from L26R, E157A, E164A, E164L, E166A, E166I, E170A, 1489A, 1489S, Y490S, Y490A, F491A, F491S, F491G, D495G, D495R, D495K, K496A, K496S, K498A, K498S, K500A, K500S, D501R, D501G, D501K, V502A, V502S, K504A, K504S, S505R, D506A, or any combinations thereof relative to the amino acid sequence of SEQ ID NO: 2. In some embodiments, the one or more amino acid alteration comprises T5R, L26K, A121Q, S198R, S223P, E258K, I471T, S579R, F701R, L26R, V139R, P707R, K189P, S638K, Q54R, Q79R, Y220S, N406K, E119S, K92E, K435Q, N568D, V521T, or any combinations thereof relative to the amino acid sequence of SEQ ID NO: 2. In some embodiments, the one or more amino acid alteration comprises D369A, D369N, D658A, D658N, E567A, E567Q, or any combinations thereof relative to the amino acid sequence of SEQ ID NO: 2. In some embodiments, the one or more amino acid alteration comprises E567A or E567Q relative to the amino acid sequence of SEQ ID NO: 2. In some embodiments, the one or more amino acid alterations comprise one or more substitutions independently selected from T5R, L26R, L26K, A121Q, V139R, S198R, S223P, E258K, I471T, S579R, F701R, P707R, K189P, S638K, Q54R, Q79R, Y220S, N406K, E119S, K92E, K435Q, N568D, and V521T, or any combinations thereof relative to the amino acid sequence of SEQ ID NO: 2. In some embodiments, the one or more amino acid alterations comprises two simultaneous amino acid substitutions selected from L26R/E109R, L26R/H208R, L26R/K184R, L26R/K38R, L26R/L182R, L26R/Q183R, L26R/S108R, L26R/S198R, L26R/T114R, E109R/H208R, E109R/K184R, E109R/K38R, E109R/L182R, E109R/Q183R, E109R/S108R, E109R/S198R, E109R/T114R, H208R/K184R, H208R/K38R, H208R/L182R, H208R/Q183R, H208R/S108R, H208R/S198R, H208R/T114R, K184R/K38R, K184R/E109R, K184R/H208R, K184R/L182R, K184R/Q183R, K184R/S108R, K184R/S198R, K184R/T114R, K38R/L182R, K38R/Q183R, K38R/S108R, K38R/S198R, K38R/T114R, L182R/Q183R, L182R/S108R, L182R/S198R, L182R/T114R, Q183R/S108R, Q183R/S198R, Q183R/T114R, S108R/S198R, S108R/T114R, S198R/T114R, S198R/K92E, L26R/1268R, L26R/G244R, F701R/K189P, Q612R/E119S, F701R/N406K, L26R/E109K, F701R/K435Q, L26R/Y220S, L26R/G57R, L26R/A716R, S579R/E119S, K348R/V521T, Q612R/S638K, K118R/K189P, F701R/V521T, K118R/K92E, Q612R/A121Q, F701R/E119S, L26R/P239R, L26R/Y231R, K348R/S223P, L26R/C279R, K348R/E119S, L26R/E100K, K348R/N406K, Q612R/E258K, L26R/S255R, F701R/K92E, Q612R/N406K, K348R/K189P, S186R/E258K, Q612R/Y220S, L26R/N568D, L26R/G241R, F701R/N568D, Q612R/K435Q, T5R/N568D, Q612R/V521T, S186R/V521T, K348R/A121Q, L26R/D234R, K348R/K92E, S579R/N568D, L26R/A59R, Q612R/K92E, L26R/H297R, L26R/E258R, K348R/K435Q, L26R/P94K, K348R/1471T, L26R/E119S, S579R/K435Q, L26R/Y709R, S198R/N568D, S186R/N568D, L26R/G497R, Q612R/N568D, K118R/N568D, L26R/L254R, K348R/E258K, L26R/P96K, L26R/Y245R, L26R/1238R, L26R/P243R, L26R/L16F, L26R/P230R, L26R/P199R, L26R/G585R, K348R/N568D, L26R/A673R, L26R/V246R, L26R/S229R, L26R/S265R, L26R/C50P, L26R/F253R, L26R/L264R, L26R/1227R, L26R/P247R, L26R/Q250R, L26R/F253R, L26R/L264R, L26R/1227R, L26R/P247R, L26K/A121Q, L26R/A121Q, K99R/L149R, K99R/N148R, L149R/H208R, S362R/L26R L26R/N148R, L26R/H208R, N30R/N148R, L26R/K99R, L26R/P707R, L26R/L149R, L26R/N30R, L26R/N355R, L26R/K281R, L26R/S108R, L26R/K348R, T5R/V139R, I2R/V139R, K99R/S186R, L26R/A673G, L26R/Q674R, S579R/L26K, F701R/E258K, T5R/L26K, L26R/K435Q, L26R/G685R, L26R/Q674K, L26R/P699R, L26R/T70E, L26R/Q232R, L26R/T252R, L26R/P679R, L26R/E83K, L26R/E73P, L26R/K248E, L26R, T5R/S223P, S579R/S223P, L26R/S223P, T5R/A121Q, L26R/A696R, S198R/1471T, L26R/N153R, L26R/E682R, L26R/D703R, Q612R/L26K, L26R/1471T, K348R/L26K, S579R/1471T, L26R/V228R, T5R/S638K, S579R/K189P, S579R/E258K, L26R/K260R, L26R/S638K, S579R/Y220S, T5R/1471T, L26R/F233R, L26R/V521T, F701R/A121Q, L26R/G361R, S198R/E258K, L26R/S472R, T5R/Y220S, L26R/A150K, L26R/S684R, L26R/E157R, L26R/K248R, F701R/L26K, S198R/N406K, S198R/Y220S, S198R/S638K, S198R/V521T, S579R/A121Q, K348R/Y220S, S198R/K189P, L26R/E242R, L26R/K678R, T5R/N406K, L26R/I158K, T5R/V521T, L26R/N259R, L26R/K257R, L26R/K256R, T5R/K189P, L26R/C405R, S579R/V521T, S579R/N406K, T5R/K92E, T5R/E258K, L26R/197R, S579R/S638K, T5R/K435Q, F701R/S638K, L26R/L236R, F701R/1471T, Q612R/S223P, F701R/S223P, S198R/E119S, S579R/K92E, L26R/E715R, Q612R/1471T, F701R/Y220S, S198R/S223P, and L26R/K266R relative to SEQ ID NO: 2. In some embodiments, the one or more amino acid alterations comprises three simultaneous amino acid substitutions selected from L26R/E109R/H208R, L26R/E109R/K184R, L26R/E109R/K38R, L26R/E109R/L182R, L26R/E109R/Q183R, L26R/E109R/S108R, L26R/E109R/S198R, L26R/E109R/T114R, L26R/H208R/K184R, L26R/H208R/K38R, L26R/H208R/L182R, L26R/H208R/Q183R, L26R/H208R/S108R, L26R/H208R/S198R, L26R/H208R/T114R, L26R/K184R/H208R, L26R/K184R/K38R, L26R/K184R/L182R, L26R/K184R/Q183R, L26R/K184R/S108R, L26R/K184R/S198R, L26R/K184R/T114R, L26R/K38R/L182R, L26R/K38R/Q183R, L26R/K38R/S108R, L26R/K38R/S198R, L26R/K38R/T114R, L26R/L182R/Q183R, L26R/L182R/S108R, L26R/L182R/S198R, L26R/L182R/T114R, L26R/Q183R/K184R, L26R/Q183R/H208R, L26R/Q183R/S108R, L26R/Q183R/S198R, L26R/Q183R/T114R, L26R/S108R/S198R, L26R/S108R/T114R, L26R/S198R/T114R, E109R/H208R/K184R, E109R/H208R/K38R, E109R/H208R/L182R, E109R/H208R/Q183R, E109R/H208R/S108R, E109R/H208R/S198R, E109R/H208R/T114R, E109R/K184R/K38R, E109R/K184R/L182R, E109R/K184R/Q183R, E109R/K184R/S108R, E109R/K184R/S198R, E109R/K184R/T114R, E109R/K38R/L182R, E109R/K38R/Q183R, E109R/K38R/S108R, E109R/K38R/S198R, E109R/K38R/T114R, E109R/L182R/Q183R, E109R/L182R/S108R, E109R/L182R/S198R, E109R/L182R/T114R, E109R/Q183R/S108R, E109R/Q183R/S198R, E109R/Q183R/T114R, E109R/S108R/S198R, E109R/S108R/T114R, E109R/S198R/T114R, H208R/K184R/K38R, H208R/K184R/L182R, H208R/K184R/Q183R, H208R/K184R/S108R, H208R/K184R/S198R, H208R/K184R/T114R, H208R/K38R/L182R, H208R/K38R/Q183R, H208R/K38R/S108R, H208R/K38R/S198R, H208R/K38R/T114R, H208R/L182R/Q183R, H208R/L182R/S108R, H208R/L182R/S198R, H208R/L182R/T114R, H208R/Q183R/S108R, H208R/Q183R/S198R, H208R/Q183R/T 114R, H208R/S108R/S198R, H208R/S108R/T 114R, H208R/S198R/T114R, K184R/K38R/L182R, K184R/K38R/Q183R, K184R/K38R/S108R, K184R/K38R/S198R, K184R/K38R/T114R, K184R/L182R/Q183R, K184R/L182R/S108R, K184R/L 182R/S198R, K184R/L182R/T114R, K184R/Q183R/S108R, K184R/Q183R/S198R, K184R/Q183R/T114R, K184R/S108R/S198R, K184R/S108R/T114R, K184R/S198R/T 114R, K38R/L182R/Q183R, K38R/L182R/S108R, K38R/L182R/S198R, K38R/L182R/T 114R, K38R/Q183R/S108R, K38R/Q183R/S198R, K38R/Q183R/T 114R, K38R/S108R/S198R, K38R/S108R/T114R, K38R/S198R/T114R, L182R/Q183R/S108R, L182R/Q183R/S198R, L182R/Q183R/T114R, L182R/S108R/S198R, L182R/S108R/T114R, L182R/S198R/T114R, Q183R/S108R/S198R, Q183R/S108R/T114R, Q183R/S198R/T114R, and S108R/S198R/T 114R relative to SEQ ID NO: 2. In some embodiments, the one or more amino acid alterations comprises four simultaneous amino acid substitutions selected from L26R/E109R/H208R/K184R, L26R/E109R/H208R/K38R, L26R/E109R/H208R/L182R, L26R/E109R/H208R/Q183R, L26R/E109R/H208R/S108R, L26R/E109R/H208R/S198R, L26R/E109R/H208R/T114R, L26R/E109R/K184R/K38R, L26R/E109R/K184R/L182R, L26R/E109R/K184R/Q183R, L26R/E109R/K184R/S108R, L26R/E109R/K184R/S198R, L26R/E109R/K184R/T114R, L26R/E109R/K38R/L182R, L26R/E109R/K38R/Q183R, L26R/E109R/K38R/S108R, L26R/E109R/K38R/S198R, L26R/E109R/K38R/T114R, L26R/E109R/L182R/Q183R, L26R/E109R/L182R/S108R, L26R/E109R/L182R/S198R, L26R/E109R/L182R/T114R, L26R/E109R/Q183R/S108R, L26R/E109R/Q183R/S198R, L26R/E109R/Q183R/T114R, L26R/E109R/S108R/S198R, L26R/E109R/S108R/T114R, L26R/E109R/S198R/T114R, L26R/H208R/K184R/K38R, L26R/H208R/K184R/L182R, L26R/H208R/K184R/Q183R, L26R/H208R/K184R/S108R, L26R/H208R/K184R/S198R, L26R/H208R/K184R/T114R, L26R/H208R/K38R/L182R, L26R/H208R/K38R/Q183R, L26R/H208R/K38R/S108R, L26R/H208R/K38R/S198R, L26R/H208R/K38R/T114R, L26R/H208R/L182R/Q183R, L26R/H208R/L182R/S108R, L26R/H208R/L182R/S198R, L26R/H208R/L182R/T114R, L26R/H208R/Q183R/S108R, L26R/H208R/Q183R/S198R, L26R/H208R/S108R/S198R, L26R/H208R/Q183R/T114R, L26R/H208R/S108R/T114R, L26R/K184R/K38R/L182R, L26R/K184R/K38R/Q183R, L26R/H208R/S198R/T114R, L26R/K184R/K38R/S198R, L26R/K184R/K38R/T114R, L26R/K184R/K38R/S108R, L26R/K184R/L182R/S108R, L26R/K184R/L182R/S198R, L26R/K184R/L182R/Q183R, L26R/K184R/Q183R/S108R, L26R/K184R/Q183R/S198R, L26R/K184R/L182R/T114R, L26R/K184R/S108R/S198R, L26R/K184R/S108R/T114R, L26R/K184R/Q183R/T114R, L26R/K38R/L182R/Q183R, L26R/K38R/L182R/S108R, L26R/K184R/S198R/T114R, L26R/K38R/Q183R/S108R, L26R/K38R/L182R/S198R, L26R/K38R/L182R/T114R, L26R/K38R/S108R/S198R, L26R/K38R/Q183R/T114R, L26R/K38R/Q183R/S198R, L26R/L182R/Q183R/S108R, L26R/K38R/S198R/T114R, L26R/K38R/S108R/T114R, L26R/L182R/S108R/S198R, L26R/L182R/Q183R/T114R, L26R/L182R/Q183R/S198R, L26R/Q183R/S108R/S198R, L26R/L182R/S198R/T114R, L26R/L182R/S108R/T114R, L26R/S108R/S198R/T114R, L26R/Q183R/S198R/T114R, L26R/Q183R/S108R/T114R, E109R/H208R/K184R/K38R, E109R/H208R/K184R/L182R, E109R/H208R/K184R/Q183R, E109R/H208R/K184R/S108R, E109R/H208R/K184R/S198R, E109R/H208R/K184R/T114R, E109R/H208R/K38R/L182R, E109R/H208R/K38R/Q183R, E109R/H208R/K38R/S108R, E109R/H208R/K38R/S198R, E109R/H208R/K38R/T114R, E109R/H208R/L182R/Q183R, E109R/H208R/L182R/S108R, E109R/H208R/L182R/S198R, E109R/H208R/L182R/T114R, E109R/H208R/Q183R/S108R, E109R/H208R/Q183R/S198R, E109R/H208R/Q183R/T114R, E109R/H208R/S108R/S198R, E109R/H208R/S108R/T114R, E109R/H208R/S198R/T114R, E109R/K184R/K38R/L182R, E109R/K184R/K38R/Q183R, E109R/K184R/K38R/S108R, E109R/K184R/K38R/S198R, E109R/K184R/K38R/T114R, E109R/K184R/L182R/Q183R, E109R/K184R/L182R/S108R, E109R/K184R/L182R/S198R, E109R/K184R/L182R/T114R, E109R/K184R/Q183R/S108R, E109R/K184R/Q183R/S198R, E109R/K184R/Q183R/T114R, E109R/K184R/S108R/S198R, E109R/K184R/S108R/T114R, E109R/K184R/S198R/T114R, E109R/K38R/L182R/Q183R, E109R/K38R/L182R/S108R, E109R/K38R/L182R/S198R, E109R/K38R/L182R/T114R, E109R/K38R/Q183R/S108R, E109R/K38R/Q183R/S198R, E109R/K38R/Q183R/T114R, E109R/K38R/S108R/S198R, E109R/K38R/S108R/T114R, E109R/K38R/S198R/T114R, E109R/L182R/Q183R/S108R, E109R/L182R/Q183R/S198R, E109R/L182R/Q183R/T114R, E109R/L182R/S108R/S198R, E109R/L182R/S108R/T114R, E109R/L182R/S198R/T114R, E109R/Q183R/S108R/S198R, E109R/Q183R/S108R/T114R, E109R/Q183R/S198R/T114R, E109R/S108R/S198R/T114R, H208R/K184R/K38R/L182R, H208R/K184R/K38R/Q183R, H208R/K184R/K38R/S108R, H208R/K184R/K38R/S198R, H208R/K184R/K38R/T114R, H208R/K184R/L182R/Q183R, H208R/K184R/L182R/S108R, H208R/K184R/L182R/S198R, H208R/K184R/L182R/T114R, H208R/K184R/Q183R/S198R, H208R/K184R/Q183R/S108R, H208R/K184R/Q183R/T114R, H208R/K184R/S108R/S198R, H208R/K184R/S108R/T114R, H208R/K184R/S198R/T114R, H208R/K38R/L182R/Q183R, H208R/K38R/L182R/S108R, H208R/K38R/L182R/S198R, H208R/K38R/L182R/T114R, H208R/K38R/Q183R/S108R, H208R/K38R/Q183R/S198R, H208R/K38R/Q183R/T114R, H208R/K38R/S108R/S198R, H208R/K38R/S108R/T114R, H208R/K38R/S198R/T114R, H208R/L182R/Q183R/S108R, H208R/L182R/Q183R/S198R, H208R/L182R/Q183R/T114R, H208R/L182R/S108R/S198R, H208R/L182R/S108R/T114R, H208R/L182R/S198R/T114R, H208R/Q183R/S108R/S198R, H208R/Q183R/S108R/T114R, H208R/Q183R/S198R/T114R, H208R/S108R/S198R/T114R, K184R/K38R/L182R/Q183R, K184R/K38R/L182R/S108R, K184R/K38R/L182R/S198R, K184R/K38R/L182R/T114R, K184R/K38R/Q183R/S108R, K184R/K38R/Q183R/S198R, K184R/K38R/Q183R/T114R, K184R/K38R/S108R/S198R, K184R/K38R/S108R/T114R, K184R/K38R/S198R/T114R, K184R/L182R/Q183R/S108R, K184R/L182R/Q183R/S198R, K184R/L182R/Q183R/T114R, K184R/L182R/S108R/S198R, K184R/L182R/S108R/T114R, K184R/L182R/S198R/T114R, K184R/Q183R/S108R/S198R, K184R/Q183R/S108R/T114R, K184R/Q183R/S198R/T114R, K184R/S108R/S198R/T114R, K38R/L182R/Q183R/S108R, K38R/L182R/Q183R/S198R, K38R/L182R/Q183R/T114R, K38R/L182R/S108R/S198R, K38R/L182R/S108R/T114R, K38R/L182R/S198R/T114R, K38R/Q183R/S108R/S198R, K38R/Q183R/S108R/T114R, K38R/Q183R/S198R/T114R, K38R/S108R/S198R/T114R, L182R/Q183R/S108R/S198R, L182R/Q183R/S108R/T114R, L182R/Q183R/S198R/T114R, L182R/S108R/S198R/T114R, Q183R/S108R/S198R/T114R, L26R/Q183R/K184R/T114R relative to SEQ ID NO: 2.

[0162] In some embodiments, the one or more amino acid alterations relative to SEQ ID NO: 2, wherein the effector protein comprising one or more alterations has nickase activity. In some embodiments, the one or more amino acid alterations comprise one or more amino acid substitutions independently selected from E157A, E164A, E164L, E166A, E166I, E170A, I489A, 1489S, Y490S, Y490A, F491A, F491S, F491G, D495G, D495R, D495K, K496A, K496S, K498A, K498S, K500A, K500S, D501R, D501G, D501K, V502A, V502S, K504A, K504S, S505R, D506A, or a combination thereof relative to SEQ ID NO: 2. In some embodiments, the one or more amino acid alterations comprise a deletion of S478-S505 and insertion of: SDLYIERGGDPRDVHQQVETKPKGKRKSEIRILKIR (SEQ ID NO: 897) or SDYIVDHGGDPEKVFFETKSKKDKTKRYKRR (SEQ ID NO: 898) relative to SEQ ID NO: 2.

[0163] In some embodiments, the one or more amino acid alterations comprise one or more substitutions relative to SEQ ID NO: 2, wherein the effector protein comprising one or more substitutions has reduced nuclease activity. In some embodiments, the one or more amino acid alterations comprise one or more amino acid substitutions independently selected from D369A, D369N, D658A, D658N, E567A, E567Q, or a combination thereof relative to SEQ ID NO: 2.

[0164] In some embodiments, the one or more amino acid alterations comprise one or more substitutions wherein a substituted amino acid is substituted with R, K, or H.

[0165] In some embodiments, effector proteins provided herein are a variant of a WT effector protein (e.g., TABLE 2), wherein the WT effector protein has an amino acid sequence of any one of the amino acid sequences set forth in TABLE 1, and the effector protein comprises one or more amino acid alterations in one or more regions that interact with a substrate, such as a target nucleic acid, an engineered guide nucleic acid, or a guide nucleic acid-target nucleic acid heteroduplex. In some embodiments, effector proteins provided herein are variants of a WT effector protein (e.g., TABLE 2), wherein the WT effector protein has an amino acid sequence of any one of the amino acid sequences set forth in TABLE 1, and the effector protein comprises one or more amino acid alterations in a region of the effector protein that comprises a substrate binding activity, a catalytic activity, and/or a binding affinity for a substrate, such as a target nucleic acid, an engineered guide nucleic acid, or a guide nucleic acid-target nucleic acid heteroduplex. In some embodiments, effector proteins provided herein are a variant of a reference effector protein (e.g., TABLE 2), wherein the WT effector protein comprises an amino acid sequence of any one of the amino acid sequences set forth in TABLE 1, and the effector protein comprises one or more amino acid alterations in a RuvC domain, a REC domain, TPID, NTPID), or a combination thereof.

[0166] In some embodiments, the variant comprises an amino acid sequence that is at least about 65%, at least about 70%, at least about 75%, at least about 80%, at least about 85%, at least about 90%, at least about 95%, at least about 97%, or at least 98%, or at least about 99% identical to the amino acid sequence of SEQ ID NO: 1 and 569-631, wherein the variant further comprises one or more mutations described in TABLE 2 relative to the amino acid sequence of SEQ ID NO: 1 and 569-631. In some embodiments, the variant comprises an amino acid sequence that is at least about 65%, at least about 70%, at least about 75%, at least about 80%, at least about 85%, at least about 90%, at least about 95%, at least about 97%, or at least 98%, at least about 99%, or 100% similar to the amino acid sequence of SEQ ID NO: 1 and 569-631, wherein the variant further comprises one or more mutations described in TABLE 2 relative to the amino acid sequence of SEQ ID NO: 1 and 569-631. In some embodiments, the variant comprises an amino acid sequence that is at least about 65%, at least about 70%, at least about 75%, at least about 80%, at least about 85%, at least about 90%, at least about 95%, at least about 97%, or at least 98%, or at least about 99% identical to the amino acid sequence of SEQ ID NO: 2 and 632-700, wherein the variant further comprises one or more mutations described in TABLE 2 relative to the amino acid sequence of SEQ ID NO: 2 and 632-700. In some embodiments, the variant comprises an amino acid sequence that is at least about 65%, at least about 70%, at least about 75%, at least about 80%, at least about 85%, at least about 90%, at least about 95%, at least about 97%, or at least 98%, at least about 99%, or 100% similar to the amino acid sequence of SEQ ID NO: 2 and 632-700, wherein the variant further comprises one or more mutations described in TABLE 2 relative to the amino acid sequence of SEQ ID NO: 2 and 632-700.

[0167] In certain embodiments, compositions, systems and methods described herein comprise a nucleic acid encoding the effector protein, wherein the nucleic acid encoding the effector protein is a messenger RNA.

[0168] In some embodiments, compositions, systems, and methods described herein comprise a polypeptide, a nucleic acid encoding the polypeptide, or polypeptide system, wherein the polypeptide the polypeptide described herein comprises an amino acid sequence that is at least 85% identical to any one of the amino acid sequences set forth in TABLE 1. In some embodiments, compositions, systems, and methods described herein comprise a polypeptide, a nucleic acid encoding the polypeptide, or polypeptide system, wherein the polypeptide the polypeptide described herein comprises an amino acid sequence that is at least 90% identical, at least 95% identical, or at least 100% identical to any one of the amino acid sequences set forth in TABLE 1. In some embodiments, the polypeptide comprises a Type V Cas effector protein. In some embodiments, the polypeptide comprises a Cas.265466, a CasPhi.12, or a variant thereof. In some embodiments, the polypeptide comprises binding activity, nuclease activity, nickase activity, base editing activity, cleavage activity, or a combination thereof. In some embodiments, the polypeptide cleaves within or near the target sequence. In some embodiments, the polypeptide cleaves at least one strand of the target nucleic acid. In some embodiments, the polypeptide comprises at least one mutation or amino acid alteration that results in retaining, enhancing or reducing activity relative to corresponding reference amino acid sequence recited in TABLE 1. In some embodiments, the at least one mutation comprises an amino acid substitution at a position as set forth in TABLE 2 relative to corresponding reference amino acid sequence of TABLE 1. In some embodiments, the polypeptide has nickase activity. In some embodiments, the polypeptide has nuclease activity.

### Effector Partners

[0169] Provided herein are compositions, systems, and methods comprising one or more effector partners or uses thereof. In some embodiments, the effector partner is a heterologous protein an effector protein described herein. In some embodiments, the effector partner is not an effector protein as described herein. In some embodiments, the effector partner is capable of imparting a function or activity that is not provided by an effector protein as described herein. In some embodiments, the effector partner comprises a second effector protein or a multimeric form thereof. In some embodiments, the effector protein is fused to an effector partner, wherein the effector protein and the effector partner are heterologous to each other. In some embodiments, the effector protein is directly fused to N terminus or C terminus of the effector partner by an amide bond.

[0170] In some embodiments, an effector partner imparts a function or activity to a fusion protein comprising an effector protein that is not provided by the effector protein, including but not limited to nuclease activity, methyltransferase activity, demethylase activity, DNA repair activity, DNA damage activity, deamination activity, dismutase activity, alkylation activity, depurination activity, oxidation activity, dimer forming activity (e.g., pyrimidine dimer forming activity), integrase activity, transposase activity, recombinase activity, polymerase activity, ligase activity, helicase activity, photolyase activity, glycosylase activity, acetyltransferase activity, deacetylase activity, kinase activity, phosphatase activity, ubiquitin ligase activity, deubiquitinating activity, adenylation activity, deadenylation activity, SUMOylating activity, deSUMOylating activity, ribosylation activity, deribosylation activity, myristoylation activity or demyristoylation activity, modification of a polypeptide associated with target nucleic acid (e.g., a histone), and/or signaling activity. In some embodiments, the effector partner is selected from a nuclease, a nickase, a polymerase, a deaminase, a reverse transcriptase, a transcriptional repressor, an integrase, a recombinase and a transcriptional activator.

[0171] In some embodiments, the effector partner is fused or linked to an effector protein described herein. In some embodiments, the amino terminus of the effector partner is linked to the carboxy terminus of the effector protein directly or by a linker. In some embodiments, the carboxy terminus of the effector partner is linked to the amino terminus of the effector protein directly or by a linker. In some embodiments, the effector partner is functional when the effector protein is coupled to a guide nucleic acid. In some embodiments, the effector partner is functional when the effector protein is coupled to a target nucleic acid. In some embodiments, the guide nucleic acid imparts sequence specific activity to the effector partner. By way of non-limiting example, the effector protein comprises a catalytically inactive effector protein (e.g., a catalytically inactive variant of an effector protein described herein) when fused or linked to an effector partner.

[0172] In some embodiments, the effector partner directly or indirectly edits a target nucleic acid. Edits can be of a nucleobase, nucleotide, or nucleotide sequence of a target nucleic acid. In some embodiments, the effector partner interacts with additional proteins, or functional fragments thereof, to make modifications to a target nucleic acid. In other embodiments, the effector partner modifies proteins associated with a target nucleic acid. In some embodiments, an effector partner modulates transcription (e.g., inhibits transcription, increases transcription) of a target nucleic acid. In yet another example, an effector partner directly or indirectly inhibits, reduces, activates or increases expression of a target nucleic acid.

### Multimeric Complex Formation Modification Activity

[0173] In some embodiments, an effector partner inhibits the formation of a multimeric complex of an effector protein. Alternatively, the effector partner promotes the formation of a multimeric complex of the effector protein.

### Reverse Transcriptase (RT) Editing System

[0174] In some embodiments, systems and methods comprise components or uses of an RT editing system to modify a target nucleic acid. In some embodiments, RT editing is also referred to as prime editing or precise nucleobase editing. In some embodiments, an RT editing system comprises an effector protein and an effector partner comprising an RT editing enzyme. In some embodiments, the effector protein that is linked to the RT editing enzyme. In some embodiments, an RT editing enzyme comprises a polymerase. In some embodiments, an RT editing enzyme comprises a reverse transcriptase. A non-limiting example of a reverse transcriptase is an M-MLV RT enzyme and variants thereof having polymerase activity. In some embodiments, the M-MLV RT enzyme comprises at least one mutation selected from D200N, L603W, T330P, T306K, and W313F relative to wildtype M-MLV RT enzyme. In some embodiments, systems and methods comprise an RT editing enzyme, wherein the RT editing enzyme is not fused or linked to the effector protein. In some embodiments, the RT editing enzyme comprises a recruiting moiety that recruits the RT editing enzyme to the target nucleic acid. By way of non-limiting example, the RT editing enzyme comprises a peptide that binds an aptamer, wherein the aptamer is located on a guide RNA, template RNA, or combination thereof. Also, by way of non-limiting example, the RT editing enzyme is linked to a protein that binds to (or is bound by) the effector protein or a protein linked/fused to the effector protein. In some embodiments, an RT editing enzyme requires an RT editing guide RNA (pegRNA) to catalyze editing. In some embodiments, the pegRNA is capable of identifying a target nucleotide or target sequence in a target nucleic acid to be edited and encoding a new genetic information that replaces the target nucleotide or target sequence in the target nucleic acid. In some embodiments, an RT editing enzyme requires a pegRNA and a guide RNA, such as a single guide RNA, to catalyze the editing. In some embodiments, the RT editing system comprises a template RNA comprising a primer binding sequence that hybridizes to a primer sequence of the dsDNA molecule that is formed when target nucleic acid is cleaved, and a template sequence that is complementary to at least a portion of the target sequence of the dsDNA molecule except for at least one nucleotide. In some embodiments, the template RNA is covalently linked to a guide RNA. In some embodiments, the template RNA is not covalently linked to a guide RNA. In some embodiments, at least a portion of the template RNA hybridizes to the target nucleic acid. In some embodiments, the target nucleic acid is a dsDNA molecule. In some embodiments, at least a portion of the template RNA hybridizes to a first strand of the target nucleic acid and at least a portion of the guide RNA hybridizes to a second strand of the target nucleic acid. In some embodiments, the pegRNA comprises: a guide RNA comprising a second region that is bound by the effector protein, and a first region comprising a spacer sequence that is complementary to a target sequence of the dsDNA molecule; and a template RNA comprising a primer binding sequence that hybridizes to a primer sequence of the dsDNA molecule that is formed when target nucleic acid is cleaved, and a template sequence that is complementary to at least a portion of the target sequence of the dsDNA molecule with the exception of at least one nucleotide. In some embodiments, the at least one nucleotide is incorporated into the target nucleic acid by activity of the RT editing enzyme, thereby modifying the target nucleic acid. In some embodiments, the spacer sequence is complementary to the target sequence on a target strand of the dsDNA molecule. In some embodiments, the spacer sequence is complementary to the target sequence on a non-target strand of the dsDNA molecule. In some embodiments, the primer binding sequence hybridizes to a primer sequence on the non-target strand of the dsDNA molecule. In some embodiments, the primer binding sequence hybridizes to a primer sequence on the target strand of the dsDNA molecule. In some embodiments, the target strand is cleaved. In some embodiments, the non-target strand is cleaved.

### Nucleic Acid Modification Activity

[0175] In some embodiments, effector partners have enzymatic activity that modifies a nucleic acid, such as a target nucleic acid. In some embodiments, the target nucleic acid comprises or consists of a ssRNA, dsRNA, ssDNA, or a dsDNA. Examples of enzymatic activity that modifies the target nucleic acid include, but are not limited to: nuclease activity, which comprises the enzymatic activity of an enzyme which allows the enzyme to cleave the phosphodiester bonds between the nucleotide subunits of nucleic acids, such as that provided by a restriction enzyme, or a nuclease (e.g., FokI nuclease); methyltransferase activity such as that provided by a methyltransferase (e.g., HhaI DNA m5c-methyltransferase (M.HhaI), DNA methyltransferase 1 (DNMT1), DNA methyltransferase 3a (DNMT3a), DNA methyltransferase 3b (DNMT3b), METI, DRM3 (plants), ZMET2, CMT1, CMT2 (plants)); demethylase activity such as that provided by a demethylase (e.g., Ten-Eleven Translocation (TET) dioxygenase 1 (TET1CD), TET1, DME, DML1, DML2, ROS1); DNA repair activity; DNA damage (e.g., oxygenation) activity; deamination activity such as that provided by a deaminase (e.g., a cytosine deaminase enzyme such as rat APOBEC1); dismutase activity; alkylation activity; depurination activity; oxidation activity; pyrimidine dimer forming activity; integrase activity such as that provided by an integrase and/or resolvase (e.g., Gin invertase such as the hyperactive mutant of the Gin invertase, GinH106Y, human immunodeficiency virus type 1 integrase (IN), Tn3 resolvase); transposase activity; recombinase activity such as that provided by a recombinase (e.g., catalytic domain of Gin recombinase); polymerase activity; ligase activity; helicase activity; photolyase activity; and glycosylase activity.

[0176] In some embodiments, effector partners target a ssRNA, dsRNA, ssDNA, or a dsDNA. In some embodiments, effector partners target ssRNA. Non-limiting examples of effector partners for targeting ssRNA include, but are not limited to, splicing factors (e.g., RS domains); protein translation components (e.g., translation initiation, elongation, and/or release factors; e.g., eIF4G); RNA methylases; RNA editing enzymes (e.g., RNA deaminases, e.g., adenosine deaminase acting on RNA (ADAR), including A to I and/or C to U editing enzymes); helicases; and RNA-binding proteins.

[0177] It is understood that an effector partner comprises an entire protein, or a fragment of the protein (e.g., a functional domain). In some embodiments, the functional domain binds or interacts with a nucleic acid, such as ssRNA, including intramolecular and/or intermolecular secondary structures thereof (e.g., hairpins, stem-loops, etc.). In some embodiments, the functional domain interacts transiently or irreversibly, directly, or indirectly. In some embodiments, a functional domain comprises a region of one or more amino acids in a protein that is required for an activity of the protein, or the full extent of that activity, as measured in an in vitro assay. Activities include but are not limited to nucleic acid binding, nucleic acid editing, nucleic acid mutating, nucleic acid modifying, nucleic acid cleaving, protein binding or combinations thereof. The absence of the functional domain, including mutations of the functional domain, would abolish or reduce activity.

[0178] Accordingly, in some embodiments, effector partners comprise a protein or domain thereof selected from: endonucleases (e.g., RNase III, the CRR22 DYW domain, Dicer, and PIN (PilT N-terminus); SMG5 and SMG6; domains responsible for stimulating RNA cleavage (e.g., CPSF, CstF, CFIm and CFIIm); exonucleases such as XRN-1 or Exonuclease T; deadenylases such as HNT3; protein domains responsible for nonsense mediated RNA decay (e.g., UPF1, UPF2, UPF3, UPF3b, RNP S1, Y14, DEK, REF2, and SRm160); protein domains responsible for stabilizing RNA (e.g., PABP); proteins and protein domains responsible for polyadenylation of RNA (e.g., PAP1, GLD-2, and Star-PAP); proteins and protein domains responsible for polyuridinylation of RNA (e.g., CI D1 and terminal uridylate transferase); and other suitable domains that affect nucleic acid modifications.

[0179] In some embodiments, effector partner comprises a chromatin-modifying enzyme. In some embodiments, the effector partner chemically modifies a target nucleic acid, for example by methylating, demethylating, or acetylating the target nucleic acid in a sequence specific or non-specific manner.

### Base Editing Enzymes

[0180] In some embodiments, effector partners edit a nucleobase of a target nucleic acid. In some embodiments, the effector partner is referred to as a base editing enzyme. In some embodiments, a base editing enzyme variant that differs from a naturally occurring base editing enzyme, but it is understood that any reference to a base editing enzyme herein also refers to a base editing enzyme variant.

[0181] In some embodiments, a base editor is a system comprising an effector protein and a base editing enzyme. In some embodiments, the base editor comprises a base editing enzyme and an effector protein as independent components. In some embodiments, the base editor comprises a fusion protein comprising a base editing enzyme fused or linked to an effector protein. In some embodiments, the amino terminus of the effector partner is linked to the carboxy terminus of the effector protein by the linker. In some embodiments, the carboxy terminus of the effector partner is linked to the amino terminus of the effector protein by the linker. In some embodiments, the base editor is functional when the effector protein is coupled to a guide nucleic acid. In some embodiments, the base editor is functional when the effector protein is coupled to a target nucleic acid. In some embodiments, the target nucleic acid comprises a gene associated a genetic blood disease or disorder. In some embodiments, the genetic blood disease or disorder comprises sickle cell anemia, sickle cell disease (SCD), β-thalassemia, or a combination thereof. The guide nucleic acid imparts sequence specific activity to the base editor. By way of non-limiting example, the effector protein comprises a catalytically inactive effector protein (e.g., a catalytically inactive variant of an effector protein described herein). Also, by way of non-limiting example, the base editing enzyme comprises deaminase activity. Additional base editors are described herein.

[0182] In some embodiments, base editing enzymes are capable of catalyzing editing (e.g., a chemical modification) of a nucleobase of a nucleic acid molecule, such as DNA or RNA (single stranded or double stranded). In some embodiments, a base editing enzyme, and therefore a base editor, is capable of converting an existing nucleobase to a different nucleobase, such as: an adenine (A) to guanine (G); cytosine (C) to thymine (T); cytosine (C) to guanine (G); uracil (U) to cytosine (C); guanine (G) to adenine (A); hydrolytic deamination of an adenine or adenosine, or methylation of cytosine (e.g., CpG, CpA, CpT or CpC). In some embodiments, base editing enzymes edit a nucleobase on a ssDNA. In some embodiments, base editing enzymes edit a nucleobase on both strands of dsDNA. In some embodiments, base editing enzymes edit a nucleobase of an RNA.

[0183] In some embodiments, a base editing enzyme itself binds or does not bind to the nucleic acid molecule containing the nucleobase. In some embodiments, upon binding to its target locus in the target nucleic acid (e.g., a DNA molecule), base pairing between the guide nucleic acid and target strand leads to displacement of a small segment of ssDNA in an “R-loop”. In some embodiments, DNA bases within the R-loop are edited by the base editing enzyme having the deaminase enzyme activity. In some embodiments, base editing systems for improved efficiency in eukaryotic cells comprise a base editing enzyme, and a catalytically inactive effector protein that generate a nick in the non-edited strand and induce repair of the non-edited strand using the edited strand as a template.

[0184] In some embodiments, a base editing enzyme comprises a deaminase enzyme. Exemplary deaminases s are described in US20210198330, WO2021041945, WO2021050571A1, and WO2020123887, all of which are incorporated herein by reference in their entirety. Exemplary deaminase domains are described WO 2018027078 and WO2017070632, and each are hereby incorporated in its entirety by reference. Also, additional exemplary deaminase domains are described in Komor et al., Nature, 533, 420-424 (2016); Gaudelli et al., Nature, 551, 464-471 (2017); Komor et al., Science Advances, 3: eaao4774 (2017), and Rees et al., Nat Rev Genet. 2018 December; 19 (12): 770-788. doi: 10.1038/s41576-018-0059-1, which are hereby incorporated by reference in their entirety. In some embodiments, the deaminase functions as a monomer. In some embodiments, the deaminase functions as heterodimer with an additional protein. In some embodiments, base editing enzymes comprise a DNA glycosylase inhibitor (e.g., an uracil glycosylase inhibitor (UGI) or uracil N-glycosylase (UNG)). In some embodiments, the effector partner is a deaminase, e.g., ADAR1/2, ADAR-2, AID, or any functional variant thereof.

[0185] In some embodiments, the base editor is a cytosine base editor (CBE), wherein the base editing enzyme is a cytosine base editing enzyme. In some embodiments, the cytosine base editing enzyme, and therefore CBE, converts a cytosine to a thymine. In some embodiments, a cytosine base editing enzyme accepts ssDNA as a substrate but is not capable of cleaving dsDNA, wherein the CBE comprises a catalytically inactive effector protein. In some embodiments, when bound to its cognate DNA, the catalytically inactive effector protein of the CBE performs local denaturation of the DNA duplex to generate an R-loop in which the DNA strand not paired with a guide nucleic acid exists as a disordered single-stranded bubble. In some embodiments, the catalytically inactive effector protein generated ssDNA R-loop enables the CBE to perform efficient and localized cytosine deamination in vitro. In some embodiments, deamination activity is exhibited in a window of about 4 to about 10 base pairs. In some embodiments, the catalytically inactive effector protein presents a target site to the cytosine base editing enzyme in high effective molarity, which enables the CBE to deaminate cytosines located in a variety of different sequence motifs, with differing efficacies. In some embodiments, the CBE is capable of mediating RNA-programmed deamination of target cytosines in vitro or in vivo. In some embodiments, the cytosine base editing enzyme is a cytidine deaminase. In some embodiments, the cytosine base editing enzyme is a cytosine base editing enzyme described by Koblan et al. (2018) Nature Biotechnology 36:848-846; Komor et al. (2016) Nature 533:420-424; Koblan et al. (2021) “Efficient C⋅G-to-G⋅C base editors developed using CRISPRi screens, target-library analysis, and machine learning,” Nature Biotechnology; Kurt et al. (2021) Nature Biotechnology 39:41-46; Zhao et al. (2021) Nature Biotechnology 39:35-40; and Chen et al. (2021) Nature Communications 12:1384, all incorporated herein by reference.

[0186] In some embodiments, the effector partner comprises a uracil glycosylase inhibitor (UGI). In some embodiments, the CBE described herein comprises UGI. Base excision repair (BER) of U⋅G in DNA is initiated by a uracil N-glycosylase (UNG), which recognizes a U⋅G mismatch generated by a CBE and cleaves the glycosidic bond between a uracil and a deoxyribose backbone of DNA. BER results in the reversion of the U⋅G intermediate created by the cytosine base editing enzyme back to a C⋅G base pair. Accordingly, in some embodiments, the UNG is inhibited by fusion of a UGI to the effector protein. In some embodiments, the UGI is a small protein from bacteriophage PBS. In some embodiments, the UGI is a DNA mimic that potently inhibits both human and bacterial UNG. In some embodiments, the UGI inhibitor is any protein or polypeptide that inhibits UNG.

[0187] In some embodiments, the CBE described herein mediates efficient base editing in bacterial cells and moderately efficient editing in mammalian cells, enabling conversion of a C⋅G base pair to a T⋅A base pair through a U⋅G intermediate. In some embodiments, the CBE is modified to increase base editing efficiency while editing more than one strand of DNA.

[0188] In some embodiments, the CBE described herein nicks a non-edited DNA strand. In some embodiments, the non-edited DNA strand nicked by the CBE biases cellular repair of a U⋅G mismatch to favor a U⋅A outcome, elevating base editing efficiency.

[0189] In some embodiments, a base editor described herein comprising one or more base editing enzymes (e.g., APOBEC1, nickase, and UGI) that efficiently edits in mammalian cells, while minimizing frequency of non-target indels. In some embodiments, base editors do not comprise a functional fragment of the base editing enzyme. In some embodiments, base editors do not comprise a function fragment of a UGI, where such a fragment is capable of excising a uracil residue from DNA by cleaving an N-glycosidic bond.

[0190] In some embodiments, the effector partner comprises a non-protein uracil-DNA glycosylase inhibitor (npUGI). In some embodiments, the npUGI is selected from a group of small molecule inhibitors of uracil-DNA glycosylase (UDG), or a nucleic acid inhibitor of UDG. In some embodiments, the npUGI is a small molecule derived from uracil. Examples of small molecule non-protein uracil-DNA glycosylase inhibitors, fusion proteins, and Cas-CRISPR systems comprising base editing activity are described in WO2021087246, which is incorporated by reference in its entirety.

[0191] In some embodiments, the base editor is a cytosine base editor, wherein the based editing enzyme is a cytosine base editing enzyme. In some embodiments, the cytosine base editing enzyme is a cytidine deaminase. In some embodiments, the base editor comprising the cytidine deaminase is generated by ancestral sequence reconstruction as described in WO2019226953, which is hereby incorporated by reference in its entirety. Non-limiting exemplary cytidine deaminases suitable for use with effector proteins described herein include: APOBEC1, APOBEC2, APOBEC3C, APOBEC3D, APOBEC3F, APOBEC3G, APOBEC3H, APOBEC4, APOBEC3A, BE1 (APOBEC1-XTEN-dCas9), BE2 (APOBEC1-XTEN-dCas9-UGI), BE3 (APOBEC1-XTEN-dCas9 (A840H)-UGI), BE3-Gam, saBE3, saBE4-Gam, BE4, BE4-Gam, saBE4, and saBE4-Gam as described in WO2021163587, WO2021087246, WO2021062227, and WO2020123887, which are incorporated herein by reference in their entirety.

[0192] In some embodiments, a base editor is a cytosine to guanine base editor (CGBE), wherein the base editing enzyme is a cytosine to guanine base editing enzyme. In some embodiments, the CGBE, converts a cytosine into a guanine.

[0193] In some embodiments, a base editor is an adenine base editor (ABE), wherein the base editing enzyme is an adenine base editing enzyme. In some embodiments, the adenine base editing enzyme, and therefore the ABE, converts an adenine to a guanine. In some embodiments, the adenine base editing enzyme converts an A⋅T base pair to a G⋅C base pair. In some embodiments, the adenine base editing enzyme converts a target A⋅T base pair to G⋅C in vivo or in vitro. In some embodiments, the adenine base editing enzymes provided herein reverse spontaneous cytosine deamination, which has been linked to pathogenic point mutations. In some embodiments, the adenine base editing enzymes provided herein enable correction of pathogenic SNPs (˜47% of disease-associated point mutations). In some embodiments, the adenine comprises exocyclic amine that has been deaminated (e.g., resulting in altering its base pairing preferences). In some embodiments, deamination of adenosine yields inosine. In some embodiments, inosine exhibits the base-pairing preference of guanine in the context of a polymerase active site, although inosine in the third position of a tRNA anticodon is capable of pairing with A, U, or C in mRNA during translation. Non-limiting exemplary adenine base editing enzymes suitable for use with effector proteins described herein include: ABE8e, ABE8.20m, APOBEC3A, Anc APOBEC (a.k.a. AncBE4Max), and BtAPOBEC2. Non-limiting exemplary ABEs suitable for use herein include: ABE7, ABE8.1m, ABE8.2m, ABE8.3m, ABE8.4m, ABE8.5m, ABE8.6m, ABE8.7m, ABE8.8m, ABE8.9m, ABE8.10m, ABE8.11m, ABE8.12m, ABE8.13m, ABE8.14m, ABE8.15m, ABE8.16m, ABE8.17m, ABE8.18m, ABE8.19m, ABE8.20m, ABE8.21m, ABE8.22m, ABE8.23m, ABE8.24m, ABE8.1d, ABE8.2d, ABE8.3d, ABE8.4d, ABE8.5d, ABE8.6d, ABE8.7d, ABE8.8d, ABE8.9d, ABE8.10d, ABE8.11d, ABE8.12d, ABE8.13d, ABE8.14d, ABE8.15d, ABE8.16d, ABE8.17d, ABE8.18d, ABE8.19d, ABE8.20d, ABE8.21d, ABE8.22d, ABE8.23d, and ABE8.24d. In some embodiments, the adenine base editing enzyme is an adenine base editing enzyme described in Chu et al., (2021) The CRISPR Journal 4:2:169-177, incorporated herein by reference. In some embodiments, the adenine deaminase is an adenine deaminase described by Koblan et al. (2018) Nature Biotechnology 36:848-846, incorporated herein by reference. In some embodiments, the adenine base editing enzyme is an adenine base editing enzyme described by Tran et al. (2020) Nature Communications 11:4871.

[0194] In some embodiments, the ABE described herein is capable of targeting polyA signals, splice site acceptors, and start codons. In some embodiments, the ABE cannot create stop codons for knock-down.

[0195] In some embodiments, an adenine base editing enzyme is an adenosine deaminase. Non-limiting exemplary adenosine base editors suitable for use herein include ABE9. In some embodiments, the ABE comprises an engineered adenosine deaminase enzyme capable of acting on ssDNA. In some embodiments, the engineered adenosine deaminase enzyme comprises an adenosine deaminase variant that differs from a naturally occurring deaminase. Relative to the naturally occurring deaminase, the adenosine deaminase variant comprises one or more amino acid alterations, including a V82S alteration, a T166R alteration, a Y147T alteration, a Y147R alteration, a Q154S alteration, a Y123H alteration, a Q154R alteration, or a combination thereof.

[0196] In some embodiments, the base editor comprises an adenine deaminase (e.g., TadA). In some embodiments, the adenosine deaminase is a TadA monomer (e.g., Tad*7.10, TadA*8 or TadA*9). In some embodiments, the adenosine deaminase is a TadA*8 variant (e.g., any one of TadA*8.1, TadA*8.2, TadA*8.3, TadA*8.4, TadA*8.5, TadA*8.6, TadA*8.7, TadA*8.8, TadA*8.9, TadA*8.10, TadA*8.11, TadA*8.12, TadA*8.13, TadA*8.14, TadA*8.15, TadA*8.16, TadA*8.17, TadA*8.18, TadA*8.19, TadA*8.20, TadA*8.21, TadA*8.22, TadA*8.23, or TadA*8.24 as described in WO2021163587 and WO2021050571, which are each hereby incorporated by reference in its entirety). In some embodiments, the base editor comprises TadA.

[0197] In some embodiments, a base editing enzyme is a deaminase dimer. In some embodiments, the ABE comprises the effector protein, the adenine base editing enzyme and the deaminase dimer. In some embodiments, the deaminase dimer comprises an adenosine deaminase. In some embodiments, the deaminase dimer comprises TadA and a suitable adenine base editing enzyme including an: ABE8e, ABE8.20m, APOBEC3A, Anc APOBEC (a.k.a. AncBE4Max), BtAPOBEC2, and variants thereof. In some embodiments, the adenine base editing enzyme is fused to amino-terminus or the carboxy-terminus of TadA.

[0198] In some embodiments, a base editor is an RNA base editor, wherein the base editing enzyme is an RNA base editing enzyme. In some embodiments, the RNA base editing enzyme comprises an adenosine deaminase. In some embodiments, ADAR proteins bind to RNAs and alter their sequence by changing an adenosine into an inosine. In some embodiments, RNA base editors comprise an effector protein that is activated by or binds RNA.

[0199] In some embodiments, base editing enzymes, and therefore base editors, are used for treating a subject having or a subject suspected of having a disease related to a gene of interest. In some embodiments, base editing enzymes, and therefore base editors, are useful for treating a disease or a disorder caused by a point mutation in a gene of interest. In some embodiments, compositions, systems, and methods described herein comprise a base editor and a guide nucleic acid, wherein the base editor comprises an effector protein and a base editing enzyme, and wherein the guide nucleic acid directs the base editor to a sequence in a target gene.

### Protein Modification Activity

[0200] In some embodiments, an effector partner provides enzymatic activity that modifies a protein associated with a target nucleic acid. In some embodiments, the protein comprises a histone, an RNA binding protein, or a DNA binding protein. Examples of such protein modification activities include: methyltransferase activity, such as that provided by a histone methyltransferase (HMT) (e.g., suppressor of variegation 3-9 homolog 1 (SUV39H1, also known as KMT1A), euchromatic histone lysine methyltransferase 2 (G9A, also known as KMT1C and EHMT2), SUV39H2, ESET/SETDB1, SET1A, SET1B, MLL1 to 5, ASH1, SYMD2, NSD1, DOT1L, Pr-SET7/8, SUV4-20H1, EZH2, RIZ1); demethylase activity such as that provided by a histone demethylase (e.g., Lysine Demethylase 1A (KDM1A also known as LSD1), JHDM2a/b, JMJD2A/JHDM3A, JMJD2B, JMJD2C/GASC1, JMJD2D, JARID1A/RBP2, JARID1B/PLU-1, JARID1C/SMCX, JARID1D/SMCY, UTX, JMJD3); acetyltransferase activity such as that provided by a histone acetylase transferase (e.g., catalytic core/fragment of the human acetyltransferase p300, GCN5, PCAF, CBP, TAF1, TIP60/PLIP, MOZ/MYST3, MORF/MYST4, HBO1/MYST2, HMOF/MYST1, SRC1, ACTR, P160, CLOCK); deacetylase activity such as that provided by a histone deacetylase (e.g., HDAC1, HDAC2, HDAC3, HDAC8, HDAC4, HDAC5, HDAC7, HDAC9, SIRT1, SIRT2, HDAC11); kinase activity; phosphatase activity; ubiquitin ligase activity; deubiquitinating activity; adenylation activity; deadenylation activity; SUMOylating activity; deSUMOylating activity; ribosylation activity; deribosylation activity; myristoylation activity; and demyristoylation activity.

### CRISPRa Fusions and CRISPRi Fusions

[0201] In some embodiments, effector partners include, but are not limited to, a protein that directly and/or indirectly provides for increased or decreased transcription and/or translation of a target nucleic acid (e.g., a transcription activator or a fragment thereof, a protein or fragment thereof that recruits a transcription activator, a small molecule/drug-responsive transcription and/or translation regulator, a translation-regulating protein, etc.). In some embodiments, effector partners that increase or decrease transcription include a transcription activator domain or a transcription repressor domain, respectively.

[0202] In some embodiments, effector partners activate or increase expression of a target nucleic acid. In some embodiments, effector partners increase expression of the target nucleic acid relative to its expression in the absence of the effector partners. Relative expression, including transcription and RNA levels, in some embodiments, is assessed, quantified, and compared, e.g., by RT-qPCR. In some embodiments, effector partners comprise a transcriptional activator. In some embodiments, the transcriptional activators promote transcription by: recruitment of other transcription factor proteins; modification of target DNA such as demethylation; recruitment of a DNA modifier; modulation of histones associated with target DNA; recruitment of a histone modifier such as those that modify acetylation and/or methylation of histones; or a combination thereof.

[0203] Non-limiting examples of effector partners that promote or increase transcription include: transcriptional activators such as VP16, VP64, VP48, VP160, p65 subdomain (e.g., from NFkB), and activation domain of EDLL and/or TAL activation domain (e.g., for activity in plants); histone lysine methyltransferases such as SET1A, SET1B, MLL1 to 5, ASH1, SYMD2, NSD1; histone lysine demethylases such as JHDM2a/b, UTX, JMJD3; histone acetyltransferases such as GCN5, PCAF, CBP, p300, TAF1, TIP60/PLIP, MOZ/MYST3, MORF/MYST4, SRC1, ACTR, P160, CLOCK; and DNA demethylases such as Ten-Eleven Translocation (TET) dioxygenase 1 (TET1CD), TET1, DME, DML1, DML2, and ROS1; and functional domains thereof. Other non-limiting examples of suitable effector partners include: proteins and protein domains responsible for stimulating translation (e.g., Staufen); proteins and protein domains responsible for (e.g., capable of) modulating translation (e.g., translation factors such as initiation factors, elongation factors, release factors, etc., e.g., eIF4G); proteins and protein domains responsible for stimulation of RNA splicing (e.g., Serine/Arginine-rich (SR) domains); and proteins and protein domains responsible for stimulating transcription (e.g., CDK7 and HIV Tat).

[0204] In some embodiments, effector partners inhibit or reduce expression of a target nucleic acid. In some embodiments, effector partners reduce expression of the target nucleic acid relative to its expression in the absence of the effector partners. Relative expression, including transcription and RNA levels, In some embodiments, is assessed, quantified, and compared, e.g., by RT-qPCR. In some embodiments, effector partners comprise a transcriptional repressor. In some embodiments, the transcriptional repressors inhibit transcription by: recruitment of other transcription factor proteins; modification of target DNA such as methylation; recruitment of a DNA modifier; modulation of histones associated with target DNA; recruitment of a histone modifier such as those that modify acetylation and/or methylation of histones; or a combination thereof.

[0205] Non-limiting examples of effector partners that decrease or inhibit transcription include: transcriptional repressors such as the Krüppel associated box (KRAB or SKD); KOX1 repression domain; the Mad mSIN3 interaction domain (SID); the ERF repressor domain (ERD), the SRDX repression domain (e.g., for repression in plants); histone lysine methyltransferases such as Pr-SET7/8, SUV4-20H1, RIZ1, and the like; histone lysine demethylases such as JMJD2A/JHDM3A, JMJD2B, JMJD2C/GASC1, JMJD2D, JARID1A/RBP2, JARID1B/PLU-1, JARID1C/SMCX, JARID1D/SMCY; histone lysine deacetylases such as HDAC1, HDAC2, HDAC3, HDAC8, HDAC4, HDAC5, HDAC7, HDAC9, SIRT1, SIRT2, HDAC11; DNA methylases such as HhaI DNA m5c-methyltransferase (M.HhaI), DNA methyltransferase 1 (DNMT1), DNA methyltransferase 3a (DNMT3a), DNA methyltransferase 3b (DNMT3b), METI, DRM3 (plants), ZMET2, CMT1, CMT2 (plants); and periphery recruitment elements such as Lamin A, and Lamin B; and functional domains thereof. Other non-limiting examples of suitable effector partners include: proteins and protein domains responsible for repressing translation (e.g., Ago2 and Ago4); proteins and protein domains responsible for repression of RNA splicing (e.g., PTB, Sam68, and hnRNP A1); proteins and protein domains responsible for reducing the efficiency of transcription (e.g., FUS (TLS)).

[0206] In some embodiments, fusion proteins comprising the described effector partners and an effector protein are referred to as CRISPRa fusions, wherein the effector partners activate or increase expression of a target nucleic acid. In some embodiments, fusion proteins comprising the described effector partners and an effector protein are referred to as CRISPRi fusions, wherein the effector partners inhibit or reduce expression of a target nucleic acid. In some embodiments, fusion proteins are targeted by a guide nucleic acid (e.g., guide RNA) to a specific location in a target nucleic acid and exert locus-specific regulation such as blocking RNA polymerase binding to a promoter (which selectively inhibits transcription activator function), and/or changes a local chromatin status (e.g., when a fusion sequence is used that edits the target nucleic acid or modifies a protein associated with the target nucleic acid). In some embodiments, the modifications are transient (e.g., transcription repression or activation). In some embodiments, the modifications are inheritable. For example, epigenetic modifications made to a target nucleic acid, or to proteins associated with the target nucleic acid, e.g., nucleosomal histones, in a cell, can be observed in a successive generation.

[0207] In some embodiments, effector partner comprises an RNA splicing factor. In some embodiments, the RNA splicing factor is used (in whole or as fragments thereof) for modular organization, with separate sequence-specific RNA binding modules and splicing effector domains. In some embodiments, the RNA splicing factors comprise members of the Serine/Arginine-rich (SR) protein family containing N-terminal RNA recognition motifs (RRMs) that bind to exonic splicing enhancers (ESEs) in pre-mRNAs and C-terminal RS domains that promote exon inclusion. In some embodiments, a hnRNP protein hnRNP A1 binds to exonic splicing silencers (ESSs) through its RRM domains and inhibits exon inclusion through a C-terminal Glycine-rich domain. In some embodiments, the RNA splicing factors regulate alternative use of splice site (ss) by binding to regulatory sequences between two alternative sites. For example, in some embodiments, ASF/SF2 recognizes ESEs and promote the use of intron proximal sites. In some embodiments, hnRNP A1 binds to ESSs and shift splicing towards the use of intron distal sites. One application for such factors is to generate ESFs that modulate alternative splicing of endogenous genes, particularly disease associated genes. For example, Bcl-x pre-mRNA produces two splicing isoforms with two alternative 5′ splice sites to encode proteins of opposite functions. Long splicing isoform Bcl-xL is a potent apoptosis inhibitor expressed in long-lived postmitotic cells and is up-regulated in many cancer cells, protecting cells against apoptotic signals. Short isoform Bcl-xS is a pro-apoptotic isoform and expressed at high levels in cells with a high turnover rate (e.g., developing lymphocytes). A ratio of the two Bcl-x splicing isoforms is regulated by multiple c\acute{ω}-elements that are located in either core exon region or exon extension region (i.e., between the two alternative 5′ splice sites). For more examples, see WO2010075303, which is hereby incorporated by reference in its entirety.

### Recombinases

[0208] In some embodiments, effector partners comprise a recombinase. In some embodiments, provided herein is a recombinase system comprising effector proteins described herein and the recombinase. In some embodiments, the effector proteins have reduced nuclease activity or no nuclease activity. In some embodiments, the recombinase is a site-specific recombinase.

[0209] In some embodiments, the recombinase system comprises a catalytically inactive effector protein, wherein the recombinase can be a site-specific recombinase. Such systems can be used for site-directed transgene insertion. Non-limiting examples of site-specific recombinases include a tyrosine recombinase (e.g., Cre, Flp or lambda integrase), a serine recombinase (e.g., gamma-delta resolvase, Tn3 resolvase, Sin resolvase, Gin invertase, Hin invertase, Tn5044 resolvase, IS607 transposase and integrase), or mutants or variants thereof. In some embodiments, the recombinase is a serine recombinase. Non-limiting examples of serine recombinases include gamma-delta resolvase, Tn3 resolvase, Sin resolvase, Gin invertase, Hin invertase, Tn5044 resolvase, IS607 transposase, and IS607 integrase. In some embodiments, the site-specific recombinase is an integrase. Non-limiting examples of integrases include: Bxb1, wBeta, BL3, phiR4, A118, TG1, MR11, phi370, SPBc, TP901-1, phiRV, FC1, K38, phiBT1, and phiC31. Further discussion and examples of suitable recombinase effector partners are described in U.S. Pat. No. 10,975,392, which is incorporated herein by reference in its entirety. In some embodiments, the fusion protein comprises a linker that links the recombinase to the Cas-CRISPR domain of the effector protein. In some embodiments, the linker is The-Ser.

### Linkers for Peptides

[0210] In some embodiments, a linker comprises a bond or molecule that links a first polypeptide to a second polypeptide. Accordingly, in some embodiments, effector proteins, effector partners, or combinations thereof are connected by linkers. In some embodiments, the linker comprises or consists of a covalent bond. In some embodiments, the linker comprises or consists of a chemical group. In some embodiments, the linker comprises an amino acid. In some embodiments, a peptide linker comprises at least two amino acids linked by an amide bond. In general, the linker connects a terminus of the effector protein to a terminus of the effector partner. In some embodiments, carboxy terminus of the effector protein is linked to the amino terminus of the fusion effector. In some embodiments, carboxy terminus of the effector partner is linked to the amino terminus of the effector protein. In some embodiments, the effector protein and the effector partner are directly linked by a covalent bond.

[0211] In some embodiments, linkers comprise one or more amino acids. In some embodiments, linker is a protein. In some embodiments, a terminus of the effector protein is linked to a terminus of the effector partner through an amide bond. In some embodiments, a terminus of the effector protein is linked to a terminus of the effector partner through a peptide bond. In some embodiments, linkers comprise an amino acid. In some embodiments, linkers comprise a peptide. In some embodiments, an effector protein is coupled to an effector partner by a linker protein. In some embodiments, the linker comprises any of a variety of amino acid sequences. In some embodiments, the linker comprises a region of rigidity (e.g., beta sheet, alpha helix), a region of flexibility, or any combination thereof. In some embodiments, the linker comprises small amino acids, such as glycine and alanine, that impart high degrees of flexibility. The ordinarily skilled artisan will recognize that design of a peptide conjugated to any desired element comprises linkers that are all or partially flexible, such that the linker comprises a flexible linker as well as one or more portions that confer less flexible structure. Suitable linkers include proteins of 4 linked amino acids to 40 linked amino acids in length, or between 4 linked amino acids and 25 linked amino acids in length. In some embodiments, linked amino acids described herein comprise at least two amino acids linked by an amide bond.

[0212] In some embodiments, linkers are produced by using synthetic, linker-encoding oligonucleotides to couple proteins, or are encoded by a nucleic acid sequence encoding a fusion protein (e.g., an effector protein coupled to an effector partner). In some embodiments, the linker is from 1 to 300, from 1 to 250, from 1 to 200, from 1 to 150, from 1 to 100, from 1 to 50, from 1 to 25, from 1 to 10, from 10 to 300, from 10 to 250, from 10 to 200, from 10 to 150, from 10 to 100, from 10 to 50, from 10 to 25, from 25 to 300, from 25 to 250, from 25 to 200, from 25 to 150, from 25 to 100, from 25 to 50, from 50 to 300, from 50 to 250, from 50 to 200, from 50 to 150, from 50 to 100, from 100 to 300, from 100 to 250, from 100 to 200, from 100 to 150, from 150 to 300, from 150 to 250, from 150 to 200, from 200 to 300, from 200 to 250, or from 250 to 300 amino acids in length. In some embodiments, the linker is from 1 to 100 amino acids in length. In some embodiments, the linker is more 100 amino acids in length. In some embodiments, the linker is from 10 to 27 amino acids in length. In some embodiments, linker proteins include glycine polymers (G)ₙ, glycine-serine polymers (including, for example, (GS)ₙ, GSGGSₙ (SEQ ID NO: 899), GGSGGSₙ (SEQ ID NO: 900), and GGGSₙ (SEQ ID NO: 901), where n is an integer of at least one), glycine-alanine polymers, and alanine-serine polymers. In some embodiments, linkers comprise amino acid sequences including, but not limited to, GGSG (SEQ ID NO: 902), GGSGG (SEQ ID NO: 903), GSGSG (SEQ ID NO: 904), GSGGG (SEQ ID NO: 905), GGGSG (SEQ ID NO: 907), and GSSSG (SEQ ID NO: 907). In some embodiments, the linker comprises one or more repeats a tri-peptide GGS. In some embodiments, the linker is an XTEN linker. In some embodiments, the XTEN linker is an XTEN80 linker. In some embodiments, the XTEN linker is an XTEN20 linker. In some embodiments, the XTEN20 linker has an amino acid sequence of GSGGSPAGSPTSTEEGTSESATPGSG (SEQ ID NO: 896).

[0213] In some embodiments, linkers do not comprise an amino acid. In some embodiments, linkers do not comprise a peptide. In some embodiments, linkers comprise a nucleotide, a polynucleotide, a polymer, or a lipid. In some embodiments, a linker comprises a polyethylene glycol (PEG), polypropylene glycol (PPG), co-poly (ethylene/propylene) glycol, polyoxyethylene (POE), polyurethane, polyphosphazene, polysaccharides, dextran, polyvinyl alcohol, polyvinylpyrrolidones, polyvinyl ethyl ether, polyacrylamide, polyacrylate, polycyanoacrylates, lipid polymers, chitins, hyaluronic acid, heparin, or an alkyl linker.

[0214] In some embodiments, a linker is recognized and cleaved by a protein. In some embodiments, a linker comprises a recognition sequence. In some embodiments, the recognition sequence is recognized and cleaved by the protein. In some embodiments, a guide nucleic acid comprises an aptamer. In some embodiments, the aptamer serves a similar function as a linker, bringing an effector protein and an effector partner protein into proximity. In some embodiments, the aptamer functionally connects two proteins (e.g., effector protein, effector partner) by interacting non-covalently with both, thereby bringing both proteins into proximity of the guide nucleic acid. In some embodiments, the first protein and/or the second protein comprise or is covalently linked to an aptamer binding moiety. In some embodiments, the aptamer is a short single stranded DNA (ssDNA) or RNA (ssRNA) molecule capable of being bound be the aptamer binding moiety. In some embodiments, the aptamer is a molecule that is capable of mimicking antibody binding activity. In some embodiments, the aptamer is classified as a chemical antibody. In some instances, the aptamer described herein refers to artificial oligonucleotides that bind one or more specific molecules. In some embodiments, aptamers exhibit a range of affinities (K_{D} in the pM to μM range) with little or no off-target binding.

### Engineered Proteins

[0215] In some embodiments, proteins (e.g., effector protein or effector partner) described herein have been modified (also referred to as an engineered protein). In some embodiments, a modification of the proteins comprises addition of one or more amino acids, deletion of one or more amino acids, substitution of one or more amino acids, or combinations thereof. In some embodiments, the proteins disclosed herein are engineered proteins. Unless otherwise indicated, reference to the proteins throughout the present disclosure include engineered proteins thereof.

[0216] In some embodiments, proteins (e.g., effector protein or effector partner) described herein can be modified with the addition of one or more heterologous peptides. In some embodiments, the protein modified with the addition of one or more heterologous peptides is referred to herein as a fusion protein. Such fusion proteins are described herein and throughout.

[0217] In some embodiments, a heterologous peptide comprises a subcellular localization signal. In some embodiments, a subcellular localization signal can be a nuclear localization signal (NLS). In some embodiments, the NLS facilitates localization of a nucleic acid, protein, or small molecule to the nucleus, when present in a cell that contains a nuclear compartment. TABLE 3 lists exemplary NLS sequences. In some embodiments, the subcellular localization signal is a nuclear export signal (NES), a sequence to keep the protein retained in the cytoplasm, a mitochondrial localization signal for targeting to the mitochondria, a chloroplast localization signal for targeting to a chloroplast, an ER retention signal, and the like. In some embodiments, the protein described herein is not modified with a subcellular localization signal so that the protein is not targeted to the nucleus, which can be advantageous depending on the circumstance (e.g., when the target nucleic acid is an RNA that is present in the cytosol).

[0218] In some embodiments, a heterologous peptide comprises a chloroplast transit peptide (CTP), also referred to as a chloroplast localization signal or a plastid transit peptide, which targets the protein to a chloroplast. Chromosomal transgenes from bacterial sources require a sequence encoding a CTP sequence fused to a sequence encoding an expressed protein (e.g., effector protein, effector partner) if the expressed protein is to be compartmentalized in the plant plastid (e.g., chloroplast). In some embodiments, the CTP is removed in a processing step during translocation into the plastid. Accordingly, localization of the protein to a chloroplast is often accomplished by means of operably linking a polynucleotide sequence encoding a CTP sequence to the 5′ region of a polynucleotide encoding the exogenous protein.

[0219] In some embodiments, the heterologous peptide is an endosomal escape peptide (EEP). An EEP is an agent that quickly disrupts the endosome in order to minimize the amount of time that a delivered molecule, such protein, spends in the endosome-like environment, and to avoid getting trapped in the endosomal vesicles and degraded in the lysosomal compartment. An exemplary EEP is set forth in TABLE 3.

[0220] In some embodiments, the heterologous peptide is a cell penetrating peptide (CPP), also known as a Protein Transduction Domain (PTD). A CPP or PTD is a polypeptide, polynucleotide, carbohydrate, or organic or inorganic compound that facilitates traversing a lipid bilayer, micelle, cell membrane, organelle membrane, or vesicle membrane.

[0221] Further suitable heterologous peptides include, but are not limited to, proteins (or fragments/domains thereof) that are boundary elements (e.g., CTCF), proteins and fragments thereof that provide periphery recruitment (e.g., Lamin A, Lamin B, etc.), and protein docking elements (e.g., FKBP/FRB, Pil1/Aby1, etc.).

[0222] In some embodiments, a heterologous peptide or heterologous peptide comprises a protein tag. In some embodiments, the protein tag is referred to as purification tag or a fluorescent protein. In some embodiments, the protein tag is detectable for use in detection of the protein and/or purification of the protein. Accordingly, in some embodiments, compositions, systems and methods comprise a protein tag or use thereof. Any suitable protein tag may be used depending on the purpose of its use. Non-limiting examples of protein tags include a fluorescent protein, a histidine tag, e.g., a 6×His tag (SEQ ID NO: 908); a hemagglutinin (HA) tag; a FLAG tag; a Myc tag; and maltose binding protein (MBP). In some embodiments, the protein tag is a portion of MBP that can be detected and/or purified. Non-limiting examples of fluorescent proteins include green fluorescent protein (GFP), yellow fluorescent protein (YFP), red fluorescent protein (RFP), cyan fluorescent protein (CFP), mCherry, and tdTomato.

[0223] In some embodiments, a heterologous peptide is located at or near the amino terminus (N-terminus) of the protein (e.g., effector protein, effector partner, fusion protein, or combinations thereof) disclosed herein. In some embodiments, a heterologous peptide is located at or near the carboxy terminus (C-terminus) of the proteins disclosed herein. In some embodiments, a heterologous peptide is located internally in the protein described herein (i.e., is not at the N- or C-terminus of the protein described herein) at a suitable insertion site.

[0224] In some embodiments, protein (e.g., effector protein or effector partner) described herein comprises 1, 2, 3, 4, 5, 6, 7, 8, 9, 10, or more heterologous peptides at or near the N-terminus, 1, 2, 3, 4, 5, 6, 7, 8, 9, 10, or more heterologous peptides at or near the C-terminus, or a combination of these (e.g., one or more heterologous peptides at the amino-terminus and one or more heterologous peptides at the carboxy terminus). When more than one heterologous peptide is present, each is selected independently of the others, such that a single heterologous peptide is present in more than one copy and/or in combination with one or more other heterologous peptides present in one or more copies. In some embodiments, a heterologous peptide is considered near the N- or C-terminus when the nearest amino acid of the heterologous peptide is within about 1, 2, 3, 4, 5, 10, 15, 20, 25, 30, 40, 50, or more amino acids along the polypeptide chain from the N- or C-terminus.

[0225] In some embodiments, a heterologous peptide described herein comprises a heterologous peptide sequence recited in TABLE 3. In some embodiments, effector proteins described herein comprise an amino acid sequence that is at least about 65%, at least about 70%, at least about 75%, at least about 80%, at least about 85%, at least about 90%, at least about 95%, at least about 97%, at least about 98%, at least about 99%, or about 100% identical to any one of the amino acid sequences recited in TABLE 1 and TABLE 2, and further comprises one or more of the amino acid sequences set forth in TABLE 3. In some embodiments, a heterologous peptide described herein comprises an effector partner as described en supra.

[0226] In some embodiments, proteins (e.g., effector protein, effector partner, fusion protein, or combinations thereof) described herein are encoded by a codon optimized nucleic acid. In some embodiments, a nucleic acid sequence encoding the protein described herein, is codon optimized. In some embodiments, the proteins described herein is codon optimized for expression in a specific cell, for example, a bacterial cell, a plant cell, a eukaryotic cell, an animal cell, a mammalian cell, or a human cell. In some embodiments, the effector protein is codon optimized for a human cell.

[0227] In some embodiments, proteins (e.g., effector protein, effector partner, fusion protein, or combinations thereof) comprise one or more modifications that provide altered activity as compared to an activity of naturally-occurring counterpart (e.g., a naturally-occurring nuclease or nickase which is a naturally-occurring protein). In some embodiments, activity (e.g., nickase, nuclease, binding, deaminase, activity) of proteins described herein is measured relative to a naturally-occurring protein or compositions containing the same in a cleavage assay.

[0228] For example, proteins (e.g., effector protein, effector partner, fusion protein, or combinations thereof) comprise one or more modifications that provide increased activity (e.g., catalytic or binding activity) as compared to a naturally-occurring counterpart. As another example, proteins provide increased catalytic activity (e.g., nickase activity, nuclease activity, binding activity, deaminase activity, integrase activity or recombination activity) as compared to a naturally-occurring counterpart. In some embodiments, proteins provide enhanced nucleic acid binding activity (e.g., enhanced binding of a guide nucleic acid, and/or target nucleic acid) as compared to a naturally-occurring counterpart. In some embodiments, proteins have a 1%, 5%, 10%, 20%, 30%, 40%, 50%, 60%, 70%, 80%, 90%, 100%, 120%, 140%, 160%, 180%, 200%, or more, increase of the activity of a naturally-occurring counterpart.

[0229] Alternatively, proteins (e.g., effector protein, effector partner, fusion protein, or combinations thereof) comprise one or more modifications that provide reduced catalytic activity (e.g., nickase activity, nuclease activity, binding activity, deaminase activity, integrase activity or recombination activity) as compared to a naturally-occurring counterpart. In some embodiments, proteins have a 100%, 90%, 80%, 70%, 60%, 50%, 40%, 30%, 20%, 10%, 5%, 1%, or less, decrease of the activity of a naturally occurring counterpart.

dCAS Proteins

[0230] In some embodiments, an effector protein that has decreased catalytic activity is referred to as catalytically or enzymatically inactive, catalytically or enzymatically dead, as a dead protein or a dCas protein. In some embodiments, such a protein comprises an enzymatically inactive domain (e.g., inactive nuclease domain). For example, in some embodiments, a nuclease domain (e.g., RuvC domain, HNH domain) of an effector protein is deleted or mutated relative to a wildtype counterpart so that it is no longer functional or comprises reduced nuclease activity. In some embodiments, a catalytically inactive effector protein comprises one or more amino acid substitutions as set forth in TABLE 2 relative to the corresponding amino acid sequence of the effector protein as set for the in TABLE 1. In some embodiments, a catalytically inactive effector protein binds to a guide nucleic acid and/or a target nucleic acid but does not cleave the target nucleic acid. In some embodiments, a catalytically inactive effector protein associates with a guide nucleic acid to activate or repress transcription of a target nucleic acid. In some embodiments, a catalytically inactive effector protein is fused to an effector partner that confers an alternative activity to an effector protein activity. Such fusion proteins are described herein and throughout.

### Fusion Proteins

[0231] In some embodiments, compositions, systems, and methods comprise a fusion protein or uses thereof. A fusion protein generally comprises at least one effector protein, at least one effector partner, or a combination thereof. In some embodiments, the effector partner is fused or linked to the effector protein. In some embodiments, the effector partner is fused to the N-terminus of the effector protein. In some embodiments, the effector partner is fused to the C-terminus of the effector protein.

[0232] In some embodiments, the fusion proteins are multimeric proteins. In some embodiments, the multimeric protein is a homomeric protein. In some embodiments, the multimeric protein is a heteromeric protein. In some embodiments, the fusion protein comprising the effector partner is an effector protein. Accordingly, in such embodiments, the fusion protein can comprise at least two effector proteins that are same. In some embodiments, the fusion protein comprises at least two effector proteins that are different. Unless otherwise indicated, reference to effector proteins throughout the present disclosure include fusion proteins described herein.

[0233] In some embodiments, the effector partner is a heterologous protein capable of imparting some function or activity that is not provided by an effector protein. In some embodiments, the effector partner is capable of cleaving or modifying the target nucleic acid. In some embodiments, the fusion proteins disclosed herein provide cleavage activity, such as cis cleavage activity, nickase activity, nuclease activity, integrase activity, recombinase activity, other activity, or a combination thereof. In some embodiments, fusion proteins disclosed herein comprise a RuvC domain capable of cleavage activity. In some embodiments, fusion proteins disclosed herein cleave nucleic acids, including single stranded RNA (ssRNA), double stranded DNA (dsDNA), and single-stranded DNA (ssDNA). In some embodiments, fusion proteins cleave the target nucleic acid at the target sequence or adjacent to the target sequence.

[0234] In some embodiments, the fusion protein complexes with a guide nucleic acid and the complex interacts with the target nucleic acid. In some embodiments, the interaction comprises one or more of: recognition of a protospacer adjacent motif (PAM) sequence within the target nucleic acid by the effector protein, hybridization of the guide nucleic acid to the target nucleic acid, modification of the target nucleic acid by the fusion protein, or combinations thereof. In some embodiments, recognition of a PAM sequence within a target nucleic acid directs the modification activity of a fusion protein.

[0235] In some embodiments, modification activity of a fusion protein described herein comprises cleavage activity, binding activity, insertion activity, substitution activity, and the like. In some embodiments, modification activity of an effector protein results in: cleavage of at least one strand of a target nucleic acid, deletion of one or more nucleotides of a target nucleic acid, insertion of one or more nucleotides into a target nucleic acid, substitution of one or more nucleotides of a target nucleic acid with an alternative nucleotide, more than one of the foregoing, or any combination thereof. In some embodiments, an ability of a fusion protein to edit a target nucleic acid depends upon the effector protein being complexed with a guide nucleic acid, the guide nucleic acid being hybridized to a target sequence of the target nucleic acid, the distance between the target sequence and a PAM sequence, or combinations thereof. A target nucleic acid comprises a target strand and a non-target strand. Accordingly, in some embodiments, the fusion protein edits a target strand and/or a non-target strand of a target nucleic acid.

[0236] In some embodiments, the fusion protein described herein comprises a heterologous amino acid sequence that affects formation of a multimeric complex of the fusion protein. By way of non-limiting example, the fusion protein comprises an effector protein described herein and an effector partner comprising a Calcineurin A tag, wherein the fusion protein dimerizes in the presence of Tacrolimus (FK506). Also, by way of non-limiting example, the fusion protein comprises an effector protein described herein and a SpyTag configured to dimerize or associate with another effector protein in a multimeric complex. Multimeric complex formation is further described herein.

### IV. Multimeric Complexes

[0237] Compositions, systems, and methods of the present disclosure comprise a multimeric complex or uses thereof, wherein the multimeric complex comprises one or more polypeptides (e.g., effector proteins, effector partners, fusion proteins, or combinations thereof) that non-covalently interact with one another. In some embodiments, a multimeric complex comprises enhanced activity relative to the activity of any one of its polypeptides (e.g., effector proteins, effector partners, fusion proteins, or combinations thereof) alone. For example, in some embodiments, a multimeric complex comprises two effector proteins (e.g., in dimeric form), wherein the multimeric complex comprises greater nucleic acid binding affinity and/or nuclease activity than that of either of the effector proteins provided in monomeric form. In some embodiments, a multimeric complex comprises one or more heterologous proteins fused to one or more effector proteins, wherein the fusion proteins are capable of different activity than that of the one or more effector proteins. In another example, a multimeric complex comprises an effector protein and a partner protein, wherein the multimeric complex comprises an effector partner, and wherein the multimeric complex comprises greater nucleic acid binding affinity and/or nuclease activity than that of either of the effector protein or effector partner provided in monomeric form. In some embodiments, a multimeric complex comprises an affinity for a target sequence of a target nucleic acid and is capable of catalytic activity (e.g., cleaving, nicking, inserting or otherwise editing the nucleic acid) at or near the target sequence. In some embodiments, a multimeric complex comprises an affinity for a donor nucleic acid and is capable of catalytic activity (e.g., cleaving, nicking, editing or otherwise modifying the nucleic acid by creating cuts) at or near one or more ends of the donor nucleic acid. In some embodiments, multimeric complexes are active when complexed with a guide nucleic acid. In some embodiments, multimeric complexes are active when complexed with a target nucleic acid. In some embodiments, multimeric complexes are active when complexed with a guide nucleic acid, a target nucleic acid, and/or a donor nucleic acid. In some embodiments, the multimeric complex cleaves the target nucleic acid. In some embodiments, the multimeric complex nicks the target nucleic acid.

[0238] Various aspects of the present disclosure include compositions and methods comprising multiple polypeptides (e.g., effector proteins, effector partners, fusion proteins, or combinations thereof), and uses thereof, respectively. An effector protein comprising an amino acid sequence that is at least 65%, at least 70%, at least 75%, at least 80%, at least 85%, at least 90%, at least 95% or 100% identical to any one of the amino acid sequences of TABLE 1 are provided with a second effector protein. Two effector proteins target different nucleic acid sequences. Two effector proteins target different types of nucleic acids (e.g., a first effector protein targets double- and single-stranded nucleic acids, and a second effector protein only targets single-stranded nucleic acids). It is understood that when discussing the use of more than one effector protein in compositions, systems, and methods provided herein, the multimeric complex form is also described.

[0239] In some embodiments, multimeric complexes comprise at least one polypeptide (e.g., effector protein, effector partner, or fusion protein) as described herein. In some embodiments, the multimeric complex is a dimer comprising a first polypeptide and a second polypeptide. In some embodiments, the first polypeptide and the second polypeptide comprise identical amino acid sequences. In some embodiments, the first polypeptide and the second polypeptide comprise amino acid sequences that are at least 90%, at least 92%, at least 94%, at least 96%, at least 98%, at least 99%, or 100% identical to each other. In some embodiments, the first polypeptide and the second polypeptide comprise similar amino acid sequences. In some embodiments, the first polypeptide and the second polypeptide comprise amino acid sequences that are at least 90%, at least 92%, at least 94%, at least 96%, at least 98%, at least 99%, or 100% similar to each other.

[0240] In some embodiments, the multimeric complex is a heterodimeric complex comprising at least two polypeptides (e.g., effector proteins, effector partners, fusion proteins, or combinations thereof) of different amino acid sequences. In some embodiments, the multimeric complex comprises two, three, four, five, six, seven, eight, nine, or ten polypeptides. In some embodiments, the multimeric complex is a heterodimeric complex comprising a first effector protein and a second effector protein, wherein the amino acid sequence of the first effector protein is less than 90%, less than 85%, less than 80%, less than 75%, less than 70%, less than 65%, less than 60%, less than 55%, less than 50%, less than 45%, less than 40%, less than 35%, less than 30%, less than 25%, less than 20%, less than 15%, or less than 10% identical to the amino acid sequence of the second effector protein.

[0241] In some embodiments, at least one effector protein of the multimeric complex comprises an amino acid sequence that is at least 65%, at least 70%, at least 75%, at least 80%, at least 85%, at least 90%, at least 95% or 100% identical to any one of the amino acid sequences of TABLE 1. In some embodiments, each effector protein of the multimeric complex independently comprises an amino acid sequence with at least 65%, at least 70%, at least 75%, at least 80%, at least 85%, at least 90%, at least 95% or 100% identity to any one of the amino acid sequences of TABLE 1.

[0242] In some embodiments, the multimeric complex described herein is capable of targeting polyA signals, splice site acceptors, and start codons. In some embodiments, the multimeric complex cannot create stop codons for knock-down. In some embodiments, the multimeric complex is a dimer comprising fusion protein described herein. In some embodiments, the fusion protein comprises the effector protein described herein, and the effector partner described herein. In some embodiments, the dimer is formed due to non-covalent interactions between the effector proteins of monomers. In some embodiments, N- and C-termini of “formerly active” monomer is closer to 5′ region of non-target strand, while the termini of the “other” monomer is closer to 3′ region, which results in a larger editing window of the multimeric complex having a larger editing window on the non-target strand. In some embodiments, the multimeric complex has a lower editing window for a target strand due to in accessibility for the effector partner.

### Protospacer Adjacent Motif (PAM) Sequences

[0243] In some embodiments, polypeptide (e.g., effector protein, effector partner, fusion protein, or a combination thereof) of the present disclosure cleaves or nicks a target nucleic acid within or near a protospacer adjacent motif (PAM) sequence of the target nucleic acid. In some embodiments, the target nucleic acid is a double stranded nucleic acid comprising a target strand and a non-target strand. In some embodiments, cleavage occurs within 1, 2, 3, 4, 5, 6, 7, 8, 9, 10, 15, 20, 25, 30, 35, 40, 45, or 50 nucleotides of a 5′ or 3′ terminus of a PAM sequence. In some embodiments, polypeptides described herein recognize a PAM sequence. In some embodiments, recognizing a PAM sequence comprises interacting with a sequence adjacent to the PAM. In some embodiments, a target nucleic acid comprises a target sequence that is adjacent to a PAM sequence. In some embodiments, the polypeptide does not require a PAM to bind and/or cleave a target nucleic acid.

[0244] In some embodiments, a target nucleic acid is a single stranded target nucleic acid comprising a target sequence. Accordingly, in some embodiments, the single stranded target nucleic acid comprises a PAM sequence described herein that is adjacent (e.g., within 1, 2, 3, 4, 5, 6, 7, 8, 9, 10, 15, 20, 25, 30, 35, 40, 45, or 50 nucleotides) or directly adjacent to the target sequence. In some embodiments, an RNP cleaves the single stranded target nucleic acid.

[0245] In some embodiments, a target nucleic acid is a double stranded nucleic acid comprising a target strand and a non-target strand, wherein the target strand comprises a target sequence. In some embodiments, the PAM sequence is located on the target strand. In some embodiments, the PAM sequence is located on the non-target strand. In some embodiments, the PAM sequence described herein is adjacent (e.g., within 1, 2, 3, 4, 5, 6, 7, 8, 9, 10, 15, 20, 25, 30, 35, 40, 45, or 50 nucleotides) to the target sequence on the target strand or the non-target strand. In some embodiments, the PAM sequence is located 5′ of a reverse complement of the target sequence on the non-target strand. In some embodiments, such a PAM described herein is directly adjacent to the target sequence on the target strand or the non-target strand. In some embodiments, an RNP cleaves the target strand or the non-target strand. In some embodiments, the RNP cleaves both, the target strand and the non-target strand. In some embodiments, an RNP recognizes the PAM sequence, and hybridizes to a target sequence of the target nucleic acid. In some embodiments, the RNP cleaves the target nucleic acid, wherein the RNP has recognized the PAM sequence and is hybridized to the target sequence.

[0246] In some embodiments, an effector protein described herein, or a multimeric complex thereof, recognizes a PAM on a target nucleic acid. In some embodiments, multiple effector proteins of the multimeric complex recognize a PAM on a target nucleic acid. In some embodiments, at least two of the multiple effector proteins recognize the same PAM sequence. In some embodiments, at least two of the multiple effector proteins recognize different PAM sequences. In some embodiments, only one effector protein of the multimeric complex recognizes a PAM on a target nucleic acid.

[0247] In some embodiments, an effector protein of the present disclosure, or a multimeric complex thereof, cleaves or nicks a target nucleic acid within or near a protospacer adjacent motif (PAM) sequence of the target nucleic acid. In some embodiments, cleavage occurs within 1, 2, 3, 4, 5, 6, 7, 8, 9 or 10 nucleotides of a 5′ or 3′ terminus of a PAM sequence.

[0248] In some embodiments, a PAM sequence provided herein comprises any one of the nucleotide sequences recited in TABLE 4. In some embodiments, polypeptide or effector protein recognizes a PAM as set forth in TABLE 4. In PAMs used in compositions, systems, and methods herein are further described throughout the application.

### V. Guide Nucleic Acids

[0249] The compositions, systems, and methods of the present disclosure comprise a guide nucleic acid or a use thereof. Unless otherwise indicated, compositions, systems and methods comprising guide nucleic acids or uses thereof, as described herein and throughout, include DNA molecules, such as expression vectors, that encode a guide nucleic acid. Accordingly, compositions, systems, and methods of the present disclosure comprise a guide nucleic acid or a nucleotide sequence encoding the guide nucleic acid. Guide nucleic acids are also referred to herein as “guide RNA.” A guide nucleic acid, as well as any components thereof (e.g., spacer sequence, repeat sequence, linker nucleotide sequence, handle sequence, intermediary sequence etc.) comprise one or more deoxyribonucleotides, ribonucleotides, biochemically or chemically modified nucleotides (e.g., one or more engineered modifications as described herein), or any combinations thereof. Such nucleotide sequences described herein may be described as a nucleotide sequence of either DNA or RNA, however, no matter the form the sequence is described, it is readily understood that such nucleotide sequences can be revised to be RNA or DNA, as needed, for describing a sequence within a guide nucleic acid itself or the nucleotide sequence that encodes a guide nucleic acid, such as a nucleotide sequence described herein for a vector. Similarly, disclosure of the nucleotide sequences described herein also discloses the complementary nucleotide sequence, the reverse nucleotide sequence, and the reverse complement nucleotide sequence, any one of which can be a nucleotide sequence for use in a guide nucleic acid as described herein. In some embodiments, a guide nucleic acid sequence(s) comprises one or more nucleotide alterations at one or more positions in any one of the nucleotide sequences described herein. Alternative nucleotides can be any one or more of A, C, G, T or U, or a deletion, or an insertion.

[0250] In some embodiments, a guide nucleic acid comprises a naturally occurring sequence. In some embodiments, a guide nucleic acid comprises a non-naturally occurring sequence, wherein the nucleotide sequence of the guide nucleic acid, or any portion thereof, is different from the nucleotide sequence of a naturally occurring guide nucleic acid. A guide nucleic acid of the present disclosure comprises one or more of the following: a) a single nucleic acid molecule; b) a DNA base; c) an RNA base; d) a modified base; e) a modified sugar; f) a modified backbone; and the like. Modifications are described herein and throughout the present disclosure (e.g., in the section entitled “Engineered Modifications”). In some embodiments, a guide nucleic acid is chemically synthesized or recombinantly produced by any suitable methods. In some embodiments, guide nucleic acids and portions thereof are found in or identified from a CRISPR array present in the genome of a host organism or cell.

[0251] In general, the guide nucleic acid comprises a nucleotide sequence that is at least 80%, at least 85%, at least 90%, at least 95%, at least 98%, at least 99%, or 100% complementary to the target sequence. In some embodiments, the guide nucleic acid comprises at least 10 contiguous nucleotides that are complementary to the target sequence in the target nucleic acid. In some embodiments, guide nucleic acid comprises a spacer sequence that is at least 80%, at least 85%, at least 90%, at least 95%, at least 98%, at least 99%, or 100% complementary to the target sequence.

[0252] In general, a guide nucleic acid comprises a first region that is not complementary to a target nucleic acid (FR) and a second region is complementary to the target nucleic acid (SR), wherein the FR and the SR are heterologous to each other. In some embodiments, FR is located 5′ to SR (FR-SR). In some embodiments, SR is located 5′ to FR (SR-FR). In some embodiments, the FR comprises one or more repeat sequence, handle sequence, intermediary sequence, or combinations thereof. In some embodiments, at least a portion of the FR interacts or binds to an effector protein. In some embodiments, the SR comprises a spacer sequence, wherein the spacer sequence can interact in a sequence-specific manner with (e.g., has complementarity with, or can hybridize to a target sequence in) a target nucleic acid.

[0253] In some embodiments, the first region, the second region, or both are about 8 linked nucleotides, about 10 linked nucleotides, about 12 linked nucleotides, about 14 linked nucleotides, about 16 linked nucleotides, about 18 linked nucleotides, about 20 linked nucleotides, about 22 linked nucleotides, about 24 linked nucleotides, about 26 linked nucleotides, about 28 linked nucleotides, about 30 linked nucleotides, about 32 linked nucleotides, about 34 linked nucleotides, about 36 linked nucleotides, about 38 linked nucleotides, about 40 linked nucleotides, about 42 linked nucleotides, about 44 linked nucleotides, about 46 linked nucleotides, about 48 linked nucleotides, or about 50 linked nucleotides.

[0254] In some embodiments, the first region, the second region, or both comprise from about 8 to about 12, from about 8 to about 16, from about 8 to about 20, from about 8 to about 24, from about 8 to about 28, from about 8 to about 30, from about 8 to about 32, from about 8 to about 34, from about 8 to about 36, from about 8 to about 38, from about 8 to about 40, from about 8 to about 42, from about 8 to about 44, from about 8 to about 48, or from about 8 to about 50 linked nucleotides.

[0255] In some embodiments, the first region, the second region, or both comprise a GC content of about 1%, about 5%, about 10%, about 15%, about 20%, about 25%, about 30%, about 40%, about 50%, about 60%, about 70%, about 80%, about 90%, about 95%, or about 99%. In some embodiments, the first region, the second region, or both comprise a GC content of from about 1% to about 95%, from about 5% to about 90%, from about 10% to about 80%, from about 15% to about 70%, from about 20% to about 60%, from about 25% to about 50%, or from about 30% to about 40%.

[0256] In some embodiments, the first region, the second region, or both have a melting temperature of about 38° C., about 40° C., about 42° C., about 44° C., about 46° C., about 48° C., about 50° C., about 52° C., about 54° C., about 56° C., about 58° C., about 60° C., about 62° C., about 64° C., about 66° C., about 68° C., about 70° C., about 72° C., about 74° C., about 76° C., about 78° C., about 80° C., about 82° C., about 84° C., about 86° C., about 88° C., about 90° C., or about 92° C. In some embodiments, the first region, the second region, or both have a melting temperature of from about 35° C. to about 40° C., from about 35° C. to about 45° C., from about 35° C. to about 50° C., from about 35° C. to about 55° C., from about 35° C. to about 60° C., from about 35° C. to about 65° C., from about 35° C. to about 70° C., from about 35° C. to about 75° C., from about 35° C. to about 80° C., or from about 35° C. to about 85° C.

[0257] In some embodiments, the guide nucleic acid is an engineered guide nucleic acid or a nucleic acid encoding the engineered guide nucleic acid, wherein the engineered guide nucleic acid comprises a first region and a second region, the first region non-covalently binds and activates the polypeptide, and the second region comprises a nucleic acid that is complementary to or the reverse complement of the target nucleic acid. In some embodiments, the first region and the second region are heterologous to each other. In some embodiments, the engineered guide nucleic acid comprises a nucleotide sequence that is at least 85% identical, at least 90% identical, at least 95% identical, or at least 100% identical to any one of the nucleotide sequences set forth in TABLE 9. In some embodiments, the first region comprises a nucleotide sequence that at least partially interacts with the polypeptide. In some embodiments, the first region comprises a nucleotide sequence that is at least 85% identical, at least 90% identical, at least 95% identical, or at least 100% identical to any one of the nucleotide sequences set forth in TABLE 5, TABLE 8, or a combination thereof. In some embodiments, the first region comprises a repeat sequence that at least partially interacts with the polypeptide. In some embodiments, the first region comprises an intermediary sequence that at least partially interacts with the polypeptide. In some embodiments, the first region comprises a handle sequence that at least partially interacts with the polypeptide. In some embodiments, the handle sequence comprises an intermediary sequence, a repeat sequence, or combinations thereof. In some embodiments, the handle sequence further comprises a linker sequence that is directly linked to the intermediary sequence, the repeat sequence, or both. In some embodiments, the second region comprises at least 10 contiguous nucleotides that are complementary to a eukaryotic sequence. In some embodiments, the second region comprises at least 10 contiguous nucleotides that are the reverse complement of the target sequence. In some embodiments, the second region comprises a spacer sequence that hybridizes to a target sequence of a target nucleic acid.

[0258] In some embodiments, the compositions, systems, and methods of the present disclosure further comprise an additional nucleic acid, wherein a portion of the additional nucleic acid at least partially hybridizes to the first region of the guide nucleic acid. In some embodiments, the additional nucleic acid is at least partially hybridized to the 5′ end of the second region of the guide nucleic acid. In some embodiments, an unhybridized portion of the additional nucleic acid, at least partially, interacts with an effector protein or polypeptide. In some embodiments, the compositions, systems, and methods of the present disclosure comprise a dual nucleic acid system comprising the guide nucleic acid and the additional nucleic acid as described herein.

[0259] In some embodiments, the guide nucleic acid also forms complexes as described through herein. For example, in some embodiments, a guide nucleic acid hybridizes to another nucleic acid, such as target nucleic acid, or a portion thereof. In another example, a guide nucleic acid complexes with an effector protein. In such embodiments, a guide nucleic acid-effector protein complex is described herein as an RNP. In some embodiments, when in a complex, at least a portion of the complex binds, recognizes, and/or hybridizes to a target nucleic acid. For example, when a guide nucleic acid and an effector protein are complexed to form an RNP, at least a portion of the guide nucleic acid hybridizes to a target sequence in a target nucleic acid. Those skilled in the art in reading the below specific examples of guide nucleic acids as used in RNPs described herein, will understand that in some embodiments, a RNP hybridizes to one or more target sequences in a target nucleic acid, thereby allowing the RNP to modify and/or recognize a target nucleic acid or sequence contained therein (e.g., PAM) or to modify and/or recognize non-target sequences depending on the guide nucleic acid, and in some embodiments, the effector protein, used.

[0260] In some embodiments, a guide nucleic acid comprises or forms intramolecular secondary structure (e.g., hairpins, stem-loops, etc.). In some embodiments, a guide nucleic acid comprises a stem-loop structure comprising a stem region and a loop region. In some embodiments, the stem region is 4 to 8 linked nucleotides in length. In some embodiments, the stem region is 5 to 6 linked nucleotides in length. In some embodiments, the stem region is 4 to 5 linked nucleotides in length. In some embodiments, the guide nucleic acid comprises a pseudoknot (e.g., a secondary structure comprising a stem, at least partially, hybridized to a second stem or half-stem secondary structure). In some embodiments, an effector protein recognizes a guide nucleic acid comprising multiple stem regions. In some embodiments, the nucleotide sequences of the multiple stem regions are identical to one another. In some embodiments, the nucleotide sequences of at least one of the multiple stem regions is not identical to those of the others. In some embodiments, the guide nucleic acid comprises at least 2, at least 3, at least 4, or at least 5 stem regions.

[0261] In some embodiments, the compositions, systems, and methods of the present disclosure comprise two or more guide nucleic acids (e.g., 2, 3, 4, 5, 6, 7, 9, 10 or more guide nucleic acids), and/or uses thereof. In some embodiments, multiple guide nucleic acids target an effector protein to different locations in the target nucleic acid by hybridizing to different target sequences. In some embodiments, a first guide nucleic acid hybridizes within a location of the target nucleic acid that is different from where a second guide nucleic acid hybridizes the target nucleic acid. In some embodiments, the first loci and the second loci of the target nucleic acid are located at least 1, at least 10, at least 20, at least 30, at least 40, at least 50, at least 60, at least 70, at least 80, at least 90 or at least 100 nucleotides apart. In some embodiments, the first loci and the second loci of the target nucleic acid are located between 100 and 200, 200 and 300, 300 and 400, 400 and 500, 500 and 600, 600 and 700, 700 and 800, 800 and 900 or 900 and 1000 nucleotides apart. In some embodiments, the first loci and/or the second loci of the target nucleic acid are located in an intron of a gene. In some embodiments, the first loci and/or the second loci of the target nucleic acid are located in an exon of a gene. In some embodiments, the first loci and/or the second loci of the target nucleic acid span an exon-intron junction of a gene. In some embodiments, the first portion and/or the second portion of the target nucleic acid are located on either side of an exon and cutting at both sites results in deletion of the exon. In some embodiments, composition, systems, and methods comprise a donor nucleic acid that is inserted in replacement of a deleted or cleaved sequence of the target nucleic acid. In some embodiments, compositions, systems, and methods comprising multiple guide nucleic acids or uses thereof comprise multiple effector proteins, wherein the effector proteins are identical, non-identical, or combinations thereof.

[0262] In some embodiments, a guide nucleic acid comprises about: 10, 11, 12, 13, 14, 15, 16, 17, 18, 19, 20, 21, 22, 23, 24, 25, 26, 27, 28, 29, 30, 31, 32, 33, 34, 35, 36, 37, 38, 39, 40, 41, 42, 43, 44, 45, 46, 47, 48, 49, 50, 51, 52, 53, 54, 55, 56, 57, 58, 59, or 60 linked nucleotides. In general, a guide nucleic acid comprises at least: 10, 15, 20, 25, 30, 35, 40, 45, 50, 55, 60 linked nucleotides. In some embodiments, the guide nucleic acid has about 10 to about 60, about 20 to about 50, or about 30 to about 40 linked nucleotides.

[0263] In some embodiments, a guide nucleic acid comprises at least 10, 11, 12, 13, 14, 15, 16, 17, 18, 19, 20, 21, 22, 23, 24, 25, 26, 27, 28, 29, or 30 contiguous nucleotides that are complementary to a eukaryotic sequence. Such a eukaryotic sequence is a nucleotide sequence that is present in a host eukaryotic cell. Such a nucleotide sequence is distinguished from nucleotide sequences present in other host cells, such as prokaryotic cells, or viruses. Said sequences present in a eukaryotic cell can be located in a gene, an exon, an intron, a non-coding (e.g., promoter or enhancer) region, a selectable marker, tag, signal, and the like. In some embodiments, a target sequence is a eukaryotic sequence.

[0264] In some embodiments, a length of a guide nucleic acid is about 30 to about 120 linked nucleotides. In some embodiments, the length of a guide nucleic acid is about 40 to about 100, about 40 to about 90, about 40 to about 80, about 40 to about 70, about 40 to about 60, about 40 to about 50, about 50 to about 90, about 50 to about 80, about 50 to about 70, or about 50 to about 60 linked nucleotides. In some embodiments, the length of a guide nucleic acid is about 40, about 45, about 50, about 55, about 60, about 65, about 70 or about 75 linked nucleotides. In some embodiments, the length of a guide nucleic acid is greater than about 15, about 20, about 25, about 30, about 35, about 40, about 45, about 50, about 55, about 60, about 65, about 70 or about 75 linked nucleotides. In some embodiments, the length of a guide nucleic acid is not greater than about 40, about 45, about 50, about 55, about 60, about 65, about 70, about 75, about 80, about 85, about 90, about 95, about 100, about 105, about 110, about 115, about 120, or about 125 linked nucleotides.

[0265] In some embodiments, guide nucleic acids comprise additional elements that contribute additional functionality (e.g., stability, heat resistance, etc.) to the guide nucleic acid. In some embodiments, the elements comprise one or more nucleotide alterations, nucleotide sequences, intermolecular secondary structures, or intramolecular secondary structures (e.g., one or more hair pin regions, one or more bulges, etc.).

[0266] In some embodiments, guide nucleic acids comprise one or more linkers connecting different nucleotide sequences as described herein. In some embodiments, a linker comprises 1, 2, 3, 4, 5, 6, 7, 8, 9, 10, or more nucleotides. In some embodiments, a linker comprises any suitable linker, examples of which are described herein.

[0267] In some embodiments, guide nucleic acids comprise one or more nucleotide sequences as described herein (e.g., TABLE 5, TABLE 6, TABLE 7, TABLE 8 and TABLE 9). In some embodiments, such nucleotide sequences described herein (e.g., TABLE 5, TABLE 6, TABLE 7, TABLE 8 and TABLE 9) are DNA or RNA, however, no matter the form of the nucleotide sequence described, it is readily understood that such nucleotide sequences may be revised to be RNA or DNA, as needed, for describing a sequence within a guide nucleic acid itself or the nucleotide sequence that encodes a guide nucleic acid, such as a nucleotide sequence described herein for a vector. Similarly, disclosure of the nucleotide sequences described herein (e.g., TABLE 5, TABLE 6, TABLE 7, TABLE 8 and TABLE 9) also discloses the complementary nucleotide sequence, the reverse nucleotide sequence, and the reverse complement nucleotide sequence, any one of which is a nucleotide sequence for use in a guide nucleic acid as described herein. In some embodiments, guide nucleic acids described herein comprise at least two nucleotide sequences as described herein (e.g., TABLE 9). In some embodiments, guide nucleic acid sequence(s) comprises one or more nucleotide alterations at one or more positions in any one of the nucleotide sequences described herein. Alternative nucleotides may be any one or more of A, C, G, T or U, or a deletion, or an insertion. In some embodiments, guide nucleic acids comprise an intermediary sequence, a linker, a spacer, a repeat, or combinations thereof. In some embodiments, guide nucleic acids comprise an intermediary sequence (SEQ ID No. 257) and a repeat sequence (any one of SEQ ID No. 251-254, 703-790, 792-811, 815-835). In some embodiments, guide nucleic acids comprise an intermediary sequence (SEQ ID No. 257) and a spacer sequence (any one of SEQ ID No. 860-893). In some embodiments, guide nucleic acids comprise an intermediary sequence (SEQ ID NO: 257), a linker sequence (SEQ ID NO: 255), a repeat sequence (SEQ ID NO: 251), and a spacer sequence (any one of SEQ ID NO: 870-893).

[0268] In some embodiments, the guide nucleic acid comprises a nucleotide sequence that is capable of hybridizing to a target sequence in a target nucleic acid, wherein the target nucleic acid is any one of: a naturally occurring eukaryotic sequence, a naturally occurring prokaryotic sequence, a naturally occurring viral sequence, a naturally occurring bacterial sequence, a naturally occurring fungal sequence, an engineered eukaryotic sequence, an engineered prokaryotic sequence, an engineered viral sequence, an engineered bacterial sequence, an engineered fungal sequence, a fragment of a naturally occurring sequence, a fragment of an engineered sequence, and combinations thereof.

[0269] In some embodiments, the guide nucleic acid is isolated from any one of: a naturally occurring cell, a eukaryotic cell, a prokaryotic cell, a plant cell, a fungal cell, an animal cell, cell of an invertebrate, a fly cell, a cell of a vertebrate, a mammalian cell, a primate cell, a non-human primate cell, a human cell, a living cell, a non-living cell, a modified cell, a derived cell, and a non-naturally occurring cell.

[0270] In some embodiments, the guide nucleic acid comprises a handle (sgRNA) or a repeat (crRNA). In some embodiments, the guide nucleic acid comprises a repeat (crRNA). In some embodiments, the guide nucleic acid is an engineered guide nucleic acid, wherein the engineered guide nucleic acid comprises a sgRNA or a crRNA. In some embodiments, the guide nucleic acid is an engineered guide nucleic acid, wherein the engineered guide nucleic acid comprises a crRNA. In some embodiments, the engineered guide nucleic acid comprises one or more phosphorothioate (PS) backbone modifications, 2′-fluoro (2′-F) sugar modifications, or 2′-O-Methyl (2′OMe) sugar modifications. In some embodiments, the nucleic acid encoding the polypeptide, the nucleic acid encoding the engineered guide nucleic acid, or both are mRNA.

### Spacer Sequence

[0271] In some embodiments, guide nucleic acids described herein comprise one or more spacer sequences. In some embodiments, a spacer sequence is capable of hybridizing to a target sequence of a target nucleic acid. In some embodiments, a spacer sequence comprises a nucleotide sequence that is, at least partially, hybridizable to an equal length of a sequence (e.g., a target sequence) of a target nucleic acid. Exemplary hybridization conditions are described herein. In some embodiments, the spacer sequence functions to direct an RNP complex comprising the guide nucleic acid to the target nucleic acid for detection and/or modification. In some embodiments, the spacer sequence functions to direct a RNP to the target nucleic acid for detection and/or modification. In some embodiments, a spacer sequence is complementary to a target sequence that is adjacent to a PAM that is recognizable by an effector protein described herein.

[0272] In some embodiments, a spacer sequence comprises at least 5 to about 50 contiguous nucleotides that are complementary to a target sequence in a target nucleic acid. In some embodiments, a spacer sequence comprises at least 5 to about 50 linked nucleotides. In some embodiments, a spacer sequence comprises at least 5 to about 50, at least 5 to about 25, at least about 10 to about 25, or at least 15 to about 25 linked nucleotides. In some embodiments, the spacer sequence comprises 15-28 linked nucleotides. In some embodiments, a spacer sequence comprises 15-26, 15-24, 15-22, 15-20, 15-18, 16-28, 16-26, 16-24, 16-22, 16-20, 16-18, 17-26, 17-24, 17-22, 17-20, 17-18, 18-26, 18-24, or 18-22 linked nucleotides. In some embodiments, the spacer sequence comprises 10, 11, 12, 13, 14, 15, 16, 17, 18, 19, 20, 21, 22, 23, 24, 25, 26, 27, 28, 29, 30, or more nucleotides.

[0273] In some embodiments, a spacer sequence comprises a nucleotide sequence that is at least 65%, at least 70%, at least 75%, at least 80%, at least 85%, at least 90%, at least 95% or 100% identical to any one of the spacer sequences listed in TABLE 7.

[0274] In some embodiments, a spacer sequence is adjacent to a repeat sequence. In some embodiments, a spacer sequence follows a repeat sequence in a 5′ to 3′ direction. In some embodiments, a spacer sequence precedes a repeat sequence in a 5′ to 3′ direction. In some embodiments, the spacer sequence(s) and the repeat sequence(s) of the guide nucleic acid are present within the same molecule. In some embodiments, the spacer(s) and repeat sequence(s) are linked directly to one another. In some embodiments, a linker is present between the spacer(s) and repeat sequences. In some embodiments, linkers comprise any suitable linker. In some embodiments, the spacer sequence(s) and the repeat sequence(s) of the guide nucleic acid are present in separate molecules, which are joined to one another by base pairing interactions.

[0275] In some embodiments, a spacer sequence is capable of hybridizing to an equal length portion of a target nucleic acid (e.g., a target sequence). In some embodiments, a target nucleic acid, such as DNA or RNA, comprises a gene associated with a genetic disorder, a cancer gene, or an amplicon thereof, as described herein. In some embodiments, a target nucleic acid comprises any one of the genes recited in TABLE 10, a variant thereof, a promoter thereof, an enhancer thereof, or a portion thereof. In some embodiments, a spacer sequence comprises a nucleotide sequence that is at least 65%, at least 70%, at least 75%, at least 80%, at least 85%, at least 90%, at least 95% or 100% complementary to or the reverse complement of a target sequence of a target nucleic acid selected from TABLE 11. In some embodiments, the spacer sequence comprises a nucleotide sequence that is at least 65%, at least 70%, at least 75%, at least 80%, at least 85%, at least 90%, at least 95% or 100% complementary to or the reverse complement of to an equal length portion of a target sequence of a gene encoding the HBB gene, a promoter thereof, an enhancer thereof, or a fragment thereof. In some embodiments, the spacer sequence comprises a nucleotide sequence that is at least 65%, at least 70%, at least 75%, at least 80%, at least 85%, at least 90%, at least 95% or 100% complementary to or the reverse complement of to an equal length portion of a target sequence of a gene encoding the BCL11A gene, a promoter thereof, an enhancer thereof, or a fragment thereof. In some embodiments, the spacer sequence comprises a nucleotide sequence that is at least 65%, at least 70%, at least 75%, at least 80%, at least 85%, at least 90%, at least 95% or 100% complementary to or the reverse complement of to an equal length portion of a target sequence of a gene encoding the HBG1 gene, a promoter thereof, an enhancer thereof, or a fragment thereof. In some embodiments, the spacer sequence comprises a nucleotide sequence that is at least 65%, at least 70%, at least 75%, at least 80%, at least 85%, at least 90%, at least 95% or 100% complementary to or the reverse complement of to an equal length portion of a target sequence of a gene encoding the HBG2 gene, a promoter thereof, an enhancer thereof, or a fragment thereof.

[0276] In some embodiments, a target nucleic acid is a nucleic acid associated with a disease or syndrome set forth in TABLE 12. In some embodiments, a spacer sequence comprises a nucleotide sequence that is at least 65%, at least 70%, at least 75%, at least 80%, at least 85%, at least 90%, at least 95% or 100% complementary to or the reverse complement of to a target sequence of a target nucleic acid associated with a disease or syndrome set forth in TABLE 12. In some embodiments, the spacer sequence comprises at least 10, 11, 12, 13, 14, 15, 16, 17, 18, 19, 20, 21, 22, 23, 24, 25, 26, 27, 28, 29, or 30 contiguous nucleotides that are capable of hybridizing to the target sequence. In some embodiments, the spacer sequence comprises at least 10, 11, 12, 13, 14, 15, 16, 17, 18, 19, 20, 21, 22, 23, 24, 25, 26, 27, 28, 29, or 30 contiguous nucleotides that are complementary to or the reverse complement of to the target sequence.

[0277] It is understood that the spacer sequence of a spacer sequence need not be 100% complementary to that of a target sequence of a target nucleic acid to hybridize or hybridize specifically to the target sequence. For example, the spacer sequence, in some embodiments, comprises at least one alteration, such as a substituted or modified nucleotide, that is not complementary to the corresponding nucleotide of the target sequence. Alternative nucleotides can be any one or more of A, C, G, T or U, or a deletion, or an insertion.

### Repeat Sequence

[0278] In some embodiments, guide nucleic acids described herein comprise one or more repeat sequences. In some embodiments, a repeat sequence comprises a nucleotide sequence that is not complementary to a target sequence of a target nucleic acid. In some embodiments, a repeat sequence comprises a nucleotide sequence that interacts with an effector protein. In some embodiments, a repeat sequence is connected to another sequence of a guide nucleic acid, such as an intermediary sequence, that is capable of non-covalently interacting with an effector protein. In some embodiments, a repeat sequence includes a nucleotide sequence that is capable of forming a guide nucleic acid-effector protein complex (e.g., a RNP complex).

[0279] In some embodiments, the repeat sequence is between 10 and 50, 12 and 48, 14 and 46, 16 and 44, and 18 and 42 nucleotides in length. In some embodiments, the repeat sequence is at least 13, at least 15, at least 18, at least 21, at least 24, at least 27, at least 30, at least 33, or at least 36 linked nucleotides in length.

[0280] In some embodiments, a repeat sequence is adjacent to a spacer sequence. In some embodiments, a repeat sequence is followed by a spacer sequence in the 5′ to 3′ direction. In some embodiments, a repeat sequence is preceded by a spacer sequence in the 5′ to 3′ direction. In some embodiments, a repeat sequence is adjacent to an intermediary sequence. In some embodiments, a repeat sequence is 3′ to an intermediary sequence. In some embodiments, an intermediary sequence is followed by a repeat sequence, which is followed by a spacer sequence in the 5′ to 3′ direction. In some embodiments, a repeat sequence is linked to a spacer sequence and/or an intermediary sequence. In some embodiments, a guide nucleic acid comprises a repeat sequence linked to a spacer sequence and/or to an intermediary sequence by a direct link or by any suitable linker, examples of which are described herein.

[0281] In some embodiments, guide nucleic acids comprise more than one repeat sequence (e.g., two or more, three or more, or four or more repeat sequences). In some embodiments, a guide nucleic acid comprises more than one repeat sequence separated by another sequence of the guide nucleic acid. For example, in some embodiments, a guide nucleic acid comprises two repeat sequences, wherein the first repeat sequence is followed by a spacer sequence, and the spacer sequence is followed by a second repeat sequence in the 5′ to 3′ direction. In some embodiments, the more than one repeat sequences are identical. In some embodiments, the more than one repeat sequences are not identical.

[0282] In some embodiments, the repeat sequence comprises two sequences that are complementary to each other and hybridize to form a double stranded RNA duplex (dsRNA duplex). In some embodiments, the two sequences are not directly linked and hybridize to form a stem loop structure. In some embodiments, the dsRNA duplex comprises 5, 10, 15, 20 or 25 base pairs (bp). In some embodiments, not all nucleotides of the dsRNA duplex are paired, and therefore the duplex forming sequence comprises a bulge. In some embodiments, the repeat sequence comprises a hairpin or stem-loop structure, optionally at the 5′ portion of the repeat sequence. In some embodiments, a strand of the stem portion comprises a sequence and the other strand of the stem portion comprises a sequence that is, at least partially, complementary. In some embodiments, such sequences comprise 65% to 100% complementarity (e.g., 65%, 70%, 75%, 80%, 85%, 90%, 95%, or 100% complementarity). In some embodiments, a guide nucleic acid comprises a nucleotide sequence that, when involved in hybridization events, hybridizes over one or more segments of a target nucleic acid such that intervening or adjacent segments are not involved in the hybridization event (e.g., a bulge, a loop structure or hairpin structure, etc.).

[0283] In some embodiments, a repeat sequence comprises a nucleotide sequence that is at least 65%, at least 70%, at least 75%, at least 80%, at least 85%, at least 90%, at least 95%, at least 97%, or at least 98%, at least 99%, or 100% identical to an equal length portion of any one of the repeat sequences in TABLE 5. In some embodiments, the repeat sequence is at least 85% identical to any one of sequences set forth in TABLE 5. In some embodiments, a repeat sequence comprises at least 5, at least 6, at least 7, at least 8, at least 9, at least 10, at least 11, at least 12, at least 13, at least 14, at least 15, at least 16, at least 17, at least 18, at least 19, at least 20, or at least 21 contiguous nucleotides of any one of the nucleotide sequences recited in TABLE 5.

[0284] In some embodiments, a repeat sequence comprises one or more nucleotide alterations at one or more positions in the nucleotide sequence recited in TABLE 5. Alternative nucleotides can be any one or more of A, C, G, T or U, or a deletion, or an insertion.

### Linker for Nucleic Acids

[0285] In some embodiments, a guide nucleic acid for use with compositions, systems, and methods described herein comprises one or more linkers, or a nucleic acid encoding one or more linkers. In some embodiments, the guide nucleic acid comprises at least one, at least two, at least three, at least four, at least five, at least six, at least seven, at least eight, at least nine, or at least ten linkers. In some embodiments, the guide nucleic acid comprises one, two, three, four, five, six, seven, eight, nine, or ten linkers. In some embodiments, the guide nucleic acid comprises more than one linker. In some embodiments, at least two of the more than one linker are the same. In some embodiments, at least two of the more than one linker are not same.

[0286] In some embodiments, a linker comprises one to ten, one to seven, one to five, one to three, two to ten, two to eight, two to six, two to four, three to ten, three to seven, three to five, four to ten, four to eight, four to six, five to ten, five to seven, six to ten, six to eight, seven to ten, or eight to ten linked nucleotides. In some embodiments, the linker comprises one, two, three, four, five, six, seven, eight, nine, or ten linked nucleotides. In some embodiments, a linker comprises a nucleotide sequence recited in TABLE 6.

[0287] In some embodiments, a guide nucleic acid comprises one or more linkers connecting one or more repeat sequences. In some embodiments, the guide nucleic acid comprises one or more linkers connecting one or more repeat sequences and one or more spacer sequences. In some embodiments, the guide nucleic acid comprises at least two repeat sequences connected by a linker.

### Intermediary Sequence

[0288] In some embodiments, guide nucleic acids described herein comprise one or more intermediary sequences. In some embodiments, intermediary RNA is a nucleotide sequence in a handle sequence, wherein the nucleotide sequence is capable of, at least partially, being non-covalently bound to an effector protein to form a complex (e.g., an RNP complex). In general, an intermediary sequence used in the present disclosure is not transactivated or transactivating. In some embodiments, an intermediary sequence is also be referred to as an intermediary RNA, although it comprises deoxyribonucleotides instead of or in addition to ribonucleotides, and/or modified bases. In general, the intermediary sequence non-covalently binds to an effector protein. In some embodiments, the intermediary sequence forms a secondary structure, for example in a cell, and an effector protein binds the secondary structure.

[0289] In some embodiments, a length of the intermediary sequence is at least 30, 40, or 50 linked nucleotides. In some embodiments, a length of the intermediary sequence is not greater than 30, 40, 50 or 60 linked nucleotides. In some embodiments, the length of the intermediary sequence is about 30 to about 60, about 40 to about 60, or about 50 to about 60 linked nucleotides.

[0290] In some embodiments, an intermediary sequence also comprises or forms a secondary structure (e.g., one or more hairpin loops) that facilitates the binding of an effector protein to a guide nucleic acid and/or modification activity of an effector protein on a target nucleic acid (e.g., a hairpin region). In some embodiments, an intermediary sequence comprises from 5′ to 3′, a 5′ region, a hairpin region, and a 3′ region. In some embodiments, the 5′ region hybridizes to the 3′ region. In some embodiments, the 5′ region of the intermediary sequence does not hybridize to the 3′ region.

[0291] In some embodiments, the hairpin region comprises a first nucleotide sequence, a second nucleotide sequence that is the reverse complement of the first nucleotide sequence, and a stem-loop linking the first nucleotide sequence and the second nucleotide sequence. In some embodiments, an intermediary sequence comprises a stem-loop structure comprising a stem region and a loop region. In some embodiments, the stem region is 4 to 8 linked nucleotides in length. In some embodiments, the stem region is 5 to 6 linked nucleotides in length. In some embodiments, the stem region is 4 to 5 linked nucleotides in length. In some embodiments, an intermediary sequence comprises a pseudoknot (e.g., a secondary structure comprising a stem at least partially hybridized to a second stem or half-stem secondary structure). In some embodiments, an effector protein interacts with an intermediary sequence comprising a single stem region or multiple stem regions. In some embodiments, the nucleotide sequences of the multiple stem regions are identical to one another. In some embodiments, the nucleotide sequences of at least one of the multiple stem regions is not identical to those of the others. In some embodiments, an intermediary sequence comprises 1, 2, 3, 4, 5 or more stem regions.

[0292] In some embodiments, an intermediary sequence comprises a nucleotide sequence that is at least 65%, at least 70%, at least 75%, at least 80%, at least 85%, at least 90%, at least 95%, at least 97%, or at least 98%, at least 99%, or 100% identical to the intermediary sequence in TABLE 8. In some embodiments, an intermediary sequence comprises at least 5, at least 6, at least 7, at least 8, at least 9, at least 10, at least 20, at least 30, at least 40, or at least 50 contiguous nucleotides of the intermediary sequence recited in TABLE 8.

[0293] In some embodiments, an intermediary sequence comprises one or more nucleotide alterations at one or more positions in the nucleotide sequence recited in TABLE 8. Alternative nucleotides can be any one or more of A, C, G, T or U, or a deletion, or an insertion.

### Handle Sequence

[0294] In some embodiments, guide nucleic acids described herein comprise one or more handle sequences. In some embodiments, the handle sequence comprises an intermediary sequence. In such instances, at least a portion of an intermediary sequence non-covalently bonds with an effector protein. In some embodiments, the intermediary sequence is at the 3′-end of the handle sequence. In some embodiments, the intermediary sequence is at the 5′-end of the handle sequence. Additionally, or alternatively, in some embodiments, the handle sequence further comprises one or more of linkers and repeat sequences. In such instances, at least a portion of an intermediary sequence, or both of at least a portion of the intermediary sequence and at least a portion of repeat sequence, non-covalently interacts with an effector protein. In some embodiments, an intermediary sequence and repeat sequence are directly linked (e.g., covalently linked, such as through a phosphodiester bond). In some embodiments, the intermediary sequence and repeat sequence are linked by a suitable linker, examples of which are provided herein. In some embodiments, the linker comprises the nucleotide sequence recited in TABLE 6. In some embodiments, the intermediary sequence is 5′ to the repeat sequence. In some embodiments, the intermediary sequence is 5′ to the linker. In some embodiments, the intermediary sequence is 3′ to the repeat sequence. In some embodiments, the intermediary sequence is 3′ to the linker. In some embodiments, the repeat sequence is 3′ to the linker. In some embodiments, the repeat sequence is 5′ to the linker. In general, a single guide nucleic acid, also referred to as a single guide RNA (sgRNA), comprises a handle sequence comprising an intermediary sequence, and optionally one or more of a repeat sequence and a linker.

[0295] In some embodiments, a handle sequence comprises or forms a secondary structure (e.g., one or more hairpin loops) that facilitates the binding of an effector protein to a guide nucleic acid and/or modification activity of an effector protein on a target nucleic acid (e.g., a hairpin region). In some embodiments, handle sequences comprise a stem-loop structure comprising a stem region and a loop region. In some embodiments, the stem region is 4 to 8 linked nucleotides in length. In some embodiments, the stem region is 5 to 6 linked nucleotides in length. In some embodiments, the stem region is 4 to 5 linked nucleotides in length. In some embodiments, the handle sequence comprises a pseudoknot (e.g., a secondary structure comprising a stem at least partially hybridized to a second stem or half-stem secondary structure). In some embodiments, an effector protein recognizes a handle sequence comprising multiple stem regions. In some embodiments, the nucleotide sequences of the multiple stem regions are identical to one another. In some embodiments, the nucleotide sequences of at least one of the multiple stem regions is not identical to those of the others. In some embodiments, the handle sequence comprises at least 2, at least 3, at least 4, or at least 5 stem regions.

[0296] In some embodiments, a length of the handle sequence is at least 30, 40, 50, 60, or 70 linked nucleotides. In some embodiments, a length of the handle sequence is not greater than 30, 40, 50, 60, or 70 linked nucleotides. In some embodiments, the length of the handle sequence is about 30 to about 70, about 40 to about 70, about 50 to about 70, or about 60 to about 70 linked nucleotides.

[0297] In some embodiments, the handle sequence comprises an intermediary sequence that is at least 65%, at least 70%, at least 75%, at least 80%, at least 85%, at least 90%, at least 95%, at least 97%, at least 98%, at least 99%, or 100% identical to any one of the nucleotide sequences as set forth in TABLE 8. In some embodiments, the handle sequence further comprises a linker sequence as set forth in TABLE 6. In some embodiments, the handle sequence further comprises a repeat sequence that is at least 65%, at least 70%, at least 75%, at least 80%, at least 85%, at least 90%, at least 95%, at least 97%, at least 98%, at least 99%, or 100% identical to any one of the nucleotide sequences as set forth in TABLE 5. In some embodiments, the handle sequence comprises an intermediary sequence that is at least 65%, at least 70%, at least 75%, at least 80%, at least 85%, at least 90%, at least 95%, at least 97%, at least 98%, at least 99%, or 100% identical to SEQ ID No. 257. In some embodiments, the handle sequence comprises a linker sequence that is at least 65%, at least 70%, at least 75%, at least 80%, at least 85%, at least 90%, at least 95%, at least 97%, at least 98%, at least 99%, or 100% identical to SEQ ID No. 255. In some embodiments, the handle sequence comprises a repeat sequence that is at least 65%, at least 70%, at least 75%, at least 80%, at least 85%, at least 90%, at least 95%, at least 97%, at least 98%, at least 99%, or 100% identical to SEQ ID No. 251 or 784. In some embodiments, the handle sequence comprises an intermediary sequence (SEQ ID No. 257), a linker sequence (SEQ ID No. 255), and a repeat sequence (SEQ ID No. 251). In some embodiments, the handle sequence comprises an intermediary sequence (SEQ ID No. 257), a linker sequence (SEQ ID No. 255), and a repeat sequence (SEQ ID No. 784). In some embodiments, the handle sequence comprises one or more nucleotide alterations at one or more positions in the nucleotide sequence. Alternative nucleotides can be any one or more of A, C, G, T or U, or a deletion, or an insertion.

### VI. A Single Nucleic Acid System

[0298] In some embodiments, compositions, systems and methods described herein comprise a single nucleic acid system comprising a guide nucleic acid or a nucleotide sequence encoding the guide nucleic acid, and one or more effector proteins or a nucleotide sequence encoding the one or more effector proteins. In some embodiments, a first region (FR) of the guide nucleic acid non-covalently interacts with the one or more polypeptides described herein. In some embodiments, a second region (SR) of the guide nucleic acid hybridizes with a target sequence of the target nucleic acid. In the single nucleic acid system having a complex of the guide nucleic acid and the effector protein, the effector protein is not transactivated by the guide nucleic acid. In other words, activity of effector protein does not require binding to a second non-target nucleic acid molecule. An exemplary guide nucleic acid for a single nucleic acid system is a crRNA or a sgRNA.

crRNA

[0299] In some embodiments, a guide nucleic acid comprises a crRNA. In some embodiments, the guide nucleic acid is the crRNA. In general, a crRNA comprises a first region (FR) and a second region (SR), wherein the FR of the crRNA comprises a repeat sequence, and the SR of the crRNA comprises a spacer sequence. In some embodiments, the repeat sequence and the spacer sequences are directly connected to each other (e.g., covalent bond (phosphodiester bond)). In some embodiments, the repeat sequence and the spacer sequence are connected by a linker.

[0300] In some embodiments, a crRNA is useful as a single nucleic acid system for compositions, methods, and systems described herein or as part of a single nucleic acid system for compositions, methods, and systems described herein. In some embodiments, a crRNA is useful as part of a single nucleic acid system for compositions, methods, and systems described herein. In such embodiments, a single nucleic acid system comprises a guide nucleic acid comprising a crRNA wherein, a repeat sequence of a crRNA is capable of connecting a crRNA to an effector protein. In some embodiments, a single nucleic acid system comprises a guide nucleic acid comprising a crRNA linked to another nucleotide sequence that is capable of being non-covalently bond by an effector protein. In such embodiments, a repeat sequence of a crRNA can be linked to an intermediary sequence. In some embodiments, a single nucleic acid system comprises a guide nucleic acid comprising a crRNA and an intermediary sequence.

[0301] In some embodiments, a crRNA comprises deoxyribonucleosides, ribonucleosides, chemically modified nucleosides, or any combination thereof. In some embodiments, a crRNA comprises about: 10, 11, 12, 13, 14, 15, 16, 17, 18, 19, 20, 21, 22, 23, 24, 25, 26, 27, 28, 29, 30, 31, 32, 33, 34, 35, 36, 37, 38, 39, 40, 41, 42, 43, 44, 45, 46, 47, 48, 49, 50, 51, 52, 53, 54, 55, 56, 57, 58, 59, or 60 linked nucleotides. In some embodiments, a crRNA comprises at least: 10, 15, 20, 25, 30, 35, 40, 45, 50, 55, 60 linked nucleotides. In some embodiments, the length of the crRNA is about 20 to about 120 linked nucleotides. In some embodiments, the length of a crRNA is about 20 to about 100, about 30 to about 100, about 40 to about 100, about 40 to about 90, about 40 to about 80, about 40 to about 70, about 40 to about 60, about 40 to about 50, about 50 to about 90, about 50 to about 80, about 50 to about 70, or about 50 to about 60 linked nucleotides. In some embodiments, the length of a crRNA is about 20, about 25, about 30, about 35, about 40, about 45, about 50, about 55, about 60, about 65, about 70 or about 75 linked nucleotides.

[0302] In some embodiments, a crRNA sequence comprises a repeat sequence that is at least 65%, at least 70%, at least 75%, at least 80%, at least 85%, at least 90%, at least 95%, at least 97%, or at least 98%, at least 99%, or 100% identical to any one of the nucleotide sequences set forth in TABLE 5 and a spacer sequence. In some embodiments, a crRNA sequence comprises at least 5, at least 6, at least 7, at least 8, at least 9, or at least 10 contiguous nucleotides of any one of the repeat sequences recited in TABLE 5 and a spacer sequence.

sgRNA

[0303] In some embodiments, a guide nucleic acid comprises a sgRNA. In some embodiments, a guide nucleic acid is a sgRNA. In some embodiments, a sgRNA comprises a first region (FR) and a second region (SR), wherein the FR comprises a handle sequence and the SR comprises a spacer sequence. In some embodiments, the handle sequence and the spacer sequences are directly connected to each other (e.g., covalent bond (phosphodiester bond)). In some embodiments, the handle sequence and the spacer sequence are connected by a linker.

[0304] In some embodiments, a sgRNA comprises one or more of a handle sequence, an intermediary sequence, a crRNA, a repeat sequence, a spacer sequence, a linker, or combinations thereof. For example, a sgRNA comprises a handle sequence and a spacer sequence; an intermediary sequence and an crRNA; an intermediary sequence, a repeat sequence and a spacer sequence; and the like.

[0305] In some embodiments, a sgRNA comprises an intermediary sequence and an crRNA. In some embodiments, an intermediary sequence is 5′ to a crRNA in a sgRNA. In some embodiments, a sgRNA comprises a linked intermediary sequence and crRNA. In some embodiments, an intermediary sequence and a crRNA are linked in a sgRNA directly (e.g., covalently linked, such as through a phosphodiester bond) In some embodiments, an intermediary sequence and a crRNA are linked in a sgRNA by any suitable linker, examples of which are provided herein.

[0306] In some embodiments, a sgRNA comprises a handle sequence and a spacer sequence. In some embodiments, a handle sequence is 5′ to a spacer sequence in a sgRNA. In some embodiments, a sgRNA comprises a linked handle sequence and spacer sequence. In some embodiments, a handle sequence and a spacer sequence are linked in a sgRNA directly (e.g., covalently linked, such as through a phosphodiester bond) In some embodiments, a handle sequence and a spacer sequence are linked in a sgRNA by any suitable linker, examples of which are provided herein.

[0307] In some embodiments, a sgRNA comprises an intermediary sequence, a repeat sequence, and a spacer sequence. In some embodiments, an intermediary sequence is 5′ to a repeat sequence in a sgRNA. In some embodiments, a sgRNA comprises a linked intermediary sequence and repeat sequence. In some embodiments, an intermediary sequence and a repeat sequence are linked in a sgRNA directly (e.g., covalently linked, such as through a phosphodiester bond) In some embodiments, an intermediary sequence and a repeat sequence are linked in a sgRNA by any suitable linker, examples of which are provided herein. In some embodiments, a repeat sequence is 5′ to a spacer sequence in a sgRNA. In some embodiments, a sgRNA comprises a linked repeat sequence and spacer sequence. In some embodiments, a repeat sequence and a spacer sequence are linked in a sgRNA directly (e.g., covalently linked, such as through a phosphodiester bond) In some embodiments, a repeat sequence and a spacer sequence are linked in a sgRNA by any suitable linker, examples of which are provided herein.

[0308] In some embodiments, a sgRNA sequence comprises a nucleotide sequence that is at least 65%, at least 70%, at least 75%, at least 80%, at least 85%, at least 90%, at least 95%, at least 97%, or at least 98%, at least 99%, or 100% identical to any one of the nucleotide sequences recited in TABLE 5, TABLE 6, TABLE 7, TABLE 8 and TABLE 9.

### VII. Engineered Modifications

[0309] Polypeptides (e.g., effector proteins) and nucleic acids (e.g., engineered guide nucleic acids) can be further modified as described herein. Examples are modifications that do not alter the primary sequence of the polypeptides or nucleic acids, such as chemical derivatization of polypeptides (e.g., acylation, acetylation, carboxylation, amidation, etc.), or modifications that do alter the primary sequence of the polypeptide or nucleic acid. Also included are polypeptides that have a modified glycosylation pattern (e.g., those made by: modifying the glycosylation patterns of a polypeptide during its synthesis and processing or in further processing steps; by exposing the polypeptide to enzymes which affect glycosylation, such as mammalian glycosylating or deglycosylating enzymes). Also embraced are polypeptides that have phosphorylated amino acid residues (e.g., phosphotyrosine, phosphoserine, or phosphothreonine).

[0310] Modifications disclosed herein can also include modification of described polypeptides and/or guide nucleic acids through any suitable method, such as molecular biological techniques and/or synthetic chemistry, to improve their resistance to proteolytic degradation, to change the target sequence specificity, to optimize solubility properties, to alter protein activity (e.g., transcription modulatory activity, enzymatic activity, etc.) or to render them more suitable for their intended purpose (e.g., in vivo administration, in vitro methods, or ex vivo applications). Analogs of such polypeptides include those containing residues other than naturally occurring L-amino acids, e.g., D-amino acids or non-naturally occurring synthetic amino acids. In some embodiments, D-amino acids is substituted for some or all of the amino acid residues. Modifications can also include modifications with non-naturally occurring unnatural amino acids. The particular sequence and the manner of preparation can be determined by convenience, economics, purity required, and the like.

[0311] Modifications can further include the introduction of various groups to polypeptides and/or guide nucleic acids described herein. For example, groups can be introduced during synthesis or during expression of a polypeptide (e.g., an effector protein), which allow for linking to other molecules or to a surface. Thus, in some embodiments, cysteines are used to make thioethers, histidines for linking to a metal ion complex, carboxyl groups for forming amides or esters, amino groups for forming amides, and the like.

[0312] Modifications can further include changing of nucleic acids described herein (e.g., engineered guide nucleic acids) to provide the nucleic acid with a new or enhanced feature, such as improved stability. Such modifications of a nucleic acid include a base editing, a base modification, a backbone modification, a sugar modification, or combinations thereof. In some embodiments, the modifications can be of one or more nucleotides, nucleosides, or nucleobases in a nucleic acid.

[0313] In some embodiments, nucleic acids (e.g., nucleic acids encoding effector proteins, engineered guide nucleic acids, or nucleic acids encoding engineered guide nucleic acids) described herein comprise one or more modifications comprising: 2′O-methyl modified nucleotides (e.g., 2′-O-Methyl (2′OMe) sugar modifications); 2′ fluoro modified nucleotides (e.g., 2′-fluoro (2′-F) sugar modifications); locked nucleic acid (LNA) modified nucleotides; peptide nucleic acid (PNA) modified nucleotides; nucleotides with phosphorothioate linkages; a 5′ cap (e.g., a 7-methylguanylate cap (m7G)), phosphorothioates, chiral phosphorothioates, phosphorodithioates, phosphotriesters, aminoalkylphosphotriesters, methyl and other alkyl phosphonates including 3′-alkylene phosphonates, 5′-alkylene phosphonates and chiral phosphonates, phosphinates, phosphoramidates including 3′-amino phosphoramidate and aminoalkyl phosphoramidates, phosphorodiamidates, thionophosphor amidates, thionoalkylphosphonates, thionoalkylphosphotriesters, selenophosphates and boranophosphates having normal 3′-5′ linkages, 2′-5′ linked analogs of these, and those having inverted polarity wherein one or more internucleotide linkages is a 3′ to 3′, 5′ to 5′ or 2′ to 2′ linkage; phosphorothioate and/or heteroatom internucleoside linkages, such as —CH₂—NH—O—CH₂—, —CH₂—N(CH₃)—O—CH₂—(known as a methylene (methylimino) or MMI backbone), —CH₂—O—N(CH₃)—CH₂—, —CH₂—N(CH₃)—N(CH₃)—CH₂— and —O—N(CH₃)—CH₂—CH₂— (wherein the native phosphodiester internucleotide linkage is represented as —O—P(═O)(OH)—O—CH₂—); morpholino linkages (formed in part from the sugar portion of a nucleoside); morpholino backbones; phosphorodiamidate or other non-phosphodiester internucleoside linkages; siloxane backbones; sulfide, sulfoxide and sulfone backbones; formacetyl and thioformacetyl backbones; methylene formacetyl and thioformacetyl backbones; riboacetyl backbones; alkene containing backbones; sulfamate backbones; methyleneimino and methylenehydrazino backbones; sulfonate and sulfonamide backbones; amide backbones; other backbone modifications having mixed N, O, S and CH₂ component parts; and combinations thereof.

### VIII. Vectors and Multiplexed Expression Vectors

[0314] Compositions, systems, and methods described herein comprise a vector or a use thereof. A vector can comprise a nucleic acid of interest. In some embodiments, the nucleic acid of interest comprises one or more components of a composition or system described herein. In some embodiments, the nucleic acid of interest comprises a nucleotide sequence that encodes one or more components of the composition or system described herein. In some embodiments, one or more components comprises a polypeptide(s) (e.g., effector protein(s), effector partner(s), fusion protein(s), or combinations thereof), guide nucleic acid(s), target nucleic acid(s), and donor nucleic acid(s). In some embodiments, the component comprises a nucleic acid encoding a polypeptide (e.g., effector protein(s), effector partner(s), fusion protein(s), or combinations thereof), a donor nucleic acid, and a guide nucleic acid or a nucleic acid encoding the guide nucleic acid. In some embodiments, a vector is a part of a vector system. In some embodiments, the vector system comprises a library of vectors each encoding one or more component of a composition or system described herein. In some embodiments, components described herein (e.g., an effector protein, a guide nucleic acid, and/or a donor nucleic acid) are encoded by the same vector. In some embodiments, components described herein (e.g., an effector protein, a guide nucleic acid, and/or a donor nucleic acid) are each encoded by different vectors of the system. In some embodiments, a vector encoding a donor nucleic acid further encodes a target nucleic acid.

[0315] In some embodiments, a vector comprises a nucleotide sequence encoding one or more polypeptides (e.g., effector proteins, effector partners, fusion proteins, or combinations thereof as described herein. In some embodiments, the one or more polypeptides comprise at least two polypeptides. In some embodiments, the at least two polypeptides are the same. In some embodiments, the at least two polypeptides are different from each other. In some embodiments, the nucleotide sequence is operably linked to a promoter that is operable in a target cell, such as a eukaryotic cell. In some embodiments, the vector comprises the nucleotide sequence encoding 1, 2, 3, 4, 5, 6, 7, 8, 9, 10, 11, 12, 13, 14, 15, 16, 17, 18, 19, 20, 21, 22, 23, 24, 25, 26, 27, 28, 29, 30, 31, 32, 33, 34, 35, 36, 37, 38, 39, 40, 41, 42, 43, 44, 45, 46, 47, 48, 49, 50 or more polypeptides.

[0316] In some embodiments, a vector encodes one or more of any system components, including but not limited to polypeptides (e.g., effector proteins, effector partners, fusion proteins, or combinations thereof), guide nucleic acids, and target nucleic acids as described herein. In some embodiments, a system component encoding sequence is operably linked to a promoter that is operable in a target cell, such as a eukaryotic cell. In some embodiments, a vector encodes 1, 2, 3, 4 or more of any system components. For example, in some embodiments, a vector encodes two or more guide nucleic acids, wherein each guide nucleic acid comprises a different sequence. In some embodiments, a vector encodes the polypeptide and the guide nucleic acid. In some embodiments, a vector encodes the polypeptide, a guide nucleic acid, a donor nucleic acid, or combinations thereof.

[0317] In some embodiments, a vector comprises one or more guide nucleic acids, or a nucleotide sequence encoding the one or more guide nucleic acids as described herein. In some embodiments, the one or more guide nucleic acids comprise at least two guide nucleic acids. In some embodiments, the at least two guide nucleic acids are the same. In some embodiments, the at least two guide nucleic acids are different from each other. In some embodiments, the guide nucleic acid or the nucleotide sequence encoding the guide nucleic acid is operably linked to a promoter that is operable in a target cell, such as a eukaryotic cell. In some embodiments, the vector comprises 1, 2, 3, 4, 5, 6, 7, 8, 9, 10, 11, 12, 13, 14, 15, 16, 17, 18, 19, 20, 21, 22, 23, 24, 25, 26, 27, 28, 29, 30, 31, 32, 33, 34, 35, 36, 37, 38, 39, 40, 41, 42, 43, 44, 45, 46, 47, 48, 49, 50 or more guide nucleic acids. In some embodiments, the vector comprises a nucleotide sequence encoding 1, 2, 3, 4, 5, 6, 7, 8, 9, 10, 11, 12, 13, 14, 15, 16, 17, 18, 19, 20, 21, 22, 23, 24, 25, 26, 27, 28, 29, 30, 31, 32, 33, 34, 35, 36, 37, 38, 39, 40, 41, 42, 43, 44, 45, 46, 47, 48, 49, 50 or more guide nucleic acids.

[0318] In some embodiments, a vector comprises one or more donor nucleic acids as described herein. In some embodiments, the one or more donor nucleic acids comprise at least two donor nucleic acids. In some embodiments, the at least two donor nucleic acids are the same. In some embodiments, the at least two donor nucleic acids are different from each other. In some embodiments, the vector comprises 1, 2, 3, 4, 5, 6, 7, 8, 9, 10, 11, 12, 13, 14, 15, 16, 17, 18, 19, 20, 21, 22, 23, 24, 25, 26, 27, 28, 29, 30, 31, 32, 33, 34, 35, 36, 37, 38, 39, 40, 41, 42, 43, 44, 45, 46, 47, 48, 49, 50 or more donor nucleic acids.

[0319] In some embodiments, a vector comprises or encodes one or more regulatory elements. Regulatory elements, in some embodiments, are refer to as transcriptional and translational control sequences, such as promoters, enhancers, polyadenylation signals, terminators, protein degradation signals, and the like, that provide for and/or regulate transcription of a non-coding sequence or a coding sequence and/or regulate translation of an encoded polypeptide. In some embodiments, a vector comprises or encodes for one or more additional elements, such as, for example, replication origins, antibiotic resistance (or a nucleic acid encoding the same), a tag (or a nucleic acid encoding the same), selectable markers, and the like. In some embodiments, a vector comprises or encodes for one or more elements, such as, for example, ribosome binding sites, and RNA splice sites.

[0320] Vectors described herein can encode a promoter—a regulatory region on a nucleic acid, such as a DNA sequence, capable of initiating transcription of a downstream (3′ direction) coding or non-coding sequence. A promoter can be linked at its 3′ terminus to a nucleic acid, the expression or transcription of which is desired, and extends upstream (5′ direction) to include bases or elements necessary to initiate transcription or induce expression, which could be measured at a detectable level. A promoter can comprise a nucleotide sequence, referred to herein as a “promoter sequence”. The promoter sequence can include a transcription initiation site, and one or more protein binding domains responsible for the binding of transcription machinery, such as RNA polymerase. When eukaryotic promoters are used, such promoters can contain “TATA” boxes and “CAT” boxes. In some embodiments, various promoters, including inducible promoters, are used to drive expression, i.e., transcriptional activation, of the nucleic acid of interest. Accordingly, in some embodiments, the nucleic acid of interest can be operably linked to a promoter.

[0321] In some embodiments, promotors comprise any suitable type of promoter envisioned for the compositions, systems, and methods described herein. Examples include constitutively active promoters (e.g., CMV promoter), inducible promoters (e.g., heat shock promoter, tetracycline-regulated promoter, steroid-regulated promoter, metal-regulated promoter, estrogen receptor-regulated promoter, etc.), spatially restricted and/or temporally restricted promoters (e.g., a tissue specific promoter, a cell type specific promoter, etc.), etc. Suitable promoters include, but are not limited to: SV40 early promoter, mouse mammary tumor virus long terminal repeat (LTR) promoter; adenovirus major late promoter (Ad MLP); a herpes simplex virus (HSV) promoter, a cytomegalovirus (CMV) promoter such as the CMV immediate early promoter region (CMVIE), a rous sarcoma virus (RSV) promoter, a human U6 small nuclear promoter (U6), an enhanced U6 promoter, and a human H1 promoter (H1). By transcriptional activation, it is intended to increase transcription above basal levels in the target cell by 2 fold, 5 fold, 10 fold, 50 fold, by 100 fold, 500 fold, or by 1000 fold, or more. In addition, vectors used for providing a nucleic acid that, when transcribed, produces a guide nucleic acid and/or a nucleic acid that encodes a polypeptide (e.g., an effector protein, an effector partner, a fusion protein, or a combination thereof) to a cell comprising nucleic acid sequences that encode for selectable markers in the target cells, so as to identify cells that have taken up the guide nucleic acid and/or the polypeptide.

[0322] In general, vectors provided herein comprise at least one promotor or a combination of promoters driving expression or transcription of one or more genome editing tools described herein. In some embodiments, the vector comprises a nucleotide sequence of a promoter. In some embodiments, the vector comprises two promoters. In some embodiments, the vector comprises three promoters. In some embodiments, a length of the promoter is less than about 500, less than about 400, less than about 300, or less than about 200 linked nucleotides. In some embodiments, a length of the promoter is at least 100, at least 200, at least 300, at least 400, or at least 500 linked nucleotides. Non-limiting examples of promoters include CMV, 7SK, EF1a, RPBSA, hPGK, EFS, SV40, PGK1, Ubc, human beta actin, TRE, UAS, Ac5, Polyhedrin, CaMKIIa, GAL1-10, H1, TEF1, GDS, ADH1, CaMV35S, HSV TK, Ubi, U6, MNDU3, MSCV, MND and CAG.

[0323] In some embodiments, some promoters (e.g., U6, enhanced U6, H1 and 7SK) prefers the nucleic acid being transcribed having “g” nucleotide at the 5′ end of the coding sequence. Accordingly, when such coding sequence is expressed, it comprises an additional “g” nucleotide at 5′ end. In some embodiments, vectors provided herein comprise a promotor driving expression or transcription of any one of the guide nucleic acids described herein (e.g., TABLE 5, TABLE 6, TABLE 7, TABLE 8 and TABLE 9) further comprises “g” nucleotide at 5′ end of the guide nucleic acid, wherein the promotor is selected from U6, enhanced U6, H1 and 7SK.

[0324] In some embodiments, the promoter is a constitutive promoter. In some embodiments, the promoter is an inducible promoter. In some embodiments, the inducible promoter only drives expression of its corresponding coding sequence (e.g., polypeptide or guide nucleic acid) when a signal is present, e.g., a hormone, a small molecule, a peptide. Non-limiting examples of inducible promoters are the T7 RNA polymerase promoter, the T3 RNA polymerase promoter, the Isopropyl-beta-D-thiogalactopyranoside (IPTG)-regulated promoter, a lactose induced promoter, a heat shock promoter, a tetracycline-regulated promoter (tetracycline-inducible or tetracycline-repressible), a steroid regulated promoter, a metal-regulated promoter, and an estrogen receptor-regulated promoter. In some embodiments, the promoter is an activation-inducible promoter, such as a CD69 promoter. In some embodiments, the promoter for expressing a polypeptide (e.g., an effector protein, an effector partner, a fusion protein, or a combination thereof) is a ubiquitous promoter. In some embodiments, the ubiquitous promoter comprises MND or CAG promoter sequence.

[0325] In some embodiments, the promoters are prokaryotic promoters (e.g., drive expression of a gene in a prokaryotic cell). In some embodiments, the promoters are eukaryotic promoters, (e.g., drive expression of a gene in a eukaryotic cell). In some embodiments, the promoter is EF1a. In some embodiments, the promoter is ubiquitin. In some embodiments, vectors are bicistronic or polycistronic vector (e.g., having or involving two or more loci responsible for generating a protein) having an internal ribosome entry site (IRES) is for translation initiation in a cap-independent manner.

[0326] In some embodiments, a vector described herein is a nucleic acid expression vector. In some embodiments, the vector encodes one or more components of any one of the systems described herein. In some embodiments, the vector further comprises a nucleotide sequence encoding a cell specific promoter. In some embodiments, the cell specific promoter is a HSC specific promoter. Also, provided herein is a library of vectors. In some embodiments, the library of vectors comprises at least one vector as described herein.

[0327] In some embodiments, a vector described herein is a recombinant expression vector. In some embodiments, a vector described herein is a messenger RNA. In some embodiments, a vector comprising the recombinant nucleic acid as described herein, wherein the vector is a viral vector, an adeno associated viral (AAV) vector, a retroviral vector, or a lentiviral vector. In some embodiments, a vector described herein or a recombinant nucleic acid described herein is comprised in a cell. In some embodiments, a recombinant nucleic acid integrated into a genomic DNA sequence of the cell, wherein the cell is a eukaryotic cell or a prokaryotic cell.

[0328] In some embodiments, a vector described herein is a delivery vector. In some embodiments, the delivery vector is a eukaryotic vector, a prokaryotic vector (e.g., a bacterial vector) a viral vector, or any combination thereof. In some embodiments, the delivery vehicle is a non-viral vector. In some embodiments, the delivery vector is a plasmid. In some embodiments, the plasmid comprises DNA. In some embodiments, the plasmid comprises RNA. In some embodiments, the plasmid comprises circular double-stranded DNA. In some embodiments, the plasmid is linear. In some embodiments, the plasmid comprises one or more coding sequences of interest and one or more regulatory elements. In some embodiments, the plasmid comprises a bacterial backbone containing an origin of replication and an antibiotic resistance gene or other selectable marker for plasmid amplification in bacteria. In some embodiments, the plasmid is a minicircle plasmid. In some embodiments, the plasmid contains one or more genes that provide a selective marker to induce a target cell to retain the plasmid. In some examples, the plasmid is formulated for delivery through injection by a needle carrying syringe. In some examples, the plasmid is formulated for delivery via electroporation. In some examples, the plasmids are engineered through synthetic or other suitable means known in the art. For example, in some embodiments, the genetic elements are assembled by restriction digest of the desired genetic sequence from a donor plasmid or organism to produce ends of the DNA which is then be readily ligated to another genetic sequence.

[0329] In some embodiments, vectors comprise an enhancer. Enhancers are nucleotide sequences that have the effect of enhancing promoter activity. In some embodiments, enhancers augment transcription regardless of the orientation of their sequence. In some embodiments, enhancers activate transcription from a distance of several kilo basepairs. Furthermore, enhancers are located optionally upstream or downstream of a gene region to be transcribed, and/or located within the gene, to activate the transcription. Exemplary enhancers include, but are not limited to, WPRE; CMV enhancers; the R-U5′ segment in LTR of HTLV-I.

### Administration of a Non-Viral Vector

[0330] In some embodiments, an administration of a non-viral vector comprises contacting a cell, such as a host cell, with the non-viral vector. In some embodiments, a physical method or a chemical method is employed for delivering the vector into the cell. Exemplary physical methods include electroporation, gene gun, sonoporation, magnetofection, or hydrodynamic delivery. Exemplary chemical methods include delivery of the recombinant polynucleotide by liposomes such as, cationic lipids or neutral lipids; lipofection; dendrimers; lipid nanoparticle (LNP); or cell-penetrating peptides.

[0331] In some embodiments, a vector is administered as part of a method of nucleic acid detection, editing, and/or treatment as described herein. In some embodiments, a vector is administered in a single vehicle, such as a single expression vector. In some embodiments, at least two of the three components, a nucleic acid encoding one or more polypeptides (e.g., effector proteins, effector partners, fusion proteins, or combinations thereof), one or more donor nucleic acids, and one or more guide nucleic acids or a nucleic acid encoding the one or more guide nucleic acid, are provided in the single expression vector. In some embodiments, components, such as a guide nucleic acid and a polypeptide (e.g., effector protein, effector partner, fusion protein, or combinations thereof), are encoded by the same vector. In some embodiments, a polypeptide (e.g., effector protein, effector partner, fusion protein, or combinations thereof) (or a nucleic acid encoding same) and/or an engineered guide nucleic acid (or a nucleic acid that, when transcribed, produces same) are not co-administered with donor nucleic acid in a single vehicle. In some embodiments, a polypeptides (e.g., effector protein, effector partner, fusion protein, or combinations thereof) (or a nucleic acid encoding same), an engineered guide nucleic acid (or a nucleic acid that, when transcribed, produces same), and/or donor nucleic acid are administered in one or more or two or more vehicles, such as one or more, or two or more expression vectors.

[0332] In some embodiments, a vector system is administered as part of a method of nucleic acid detection, editing, and/or treatment as described herein, wherein at least two vectors are co-administered. In some embodiments, the at least two vectors comprise different components. In some embodiments, the at least two vectors comprise the same component having different sequences. In some embodiments, at least one of the three components, a nucleic acid encoding one or more polypeptides (e.g., effector proteins, effector partners, fusion proteins, or combinations thereof), one or more donor nucleic acids, and one or more guide nucleic acids or a nucleic acid encoding the one or more guide nucleic acids, or a variant thereof is provided in a different vector. In some embodiments, the nucleic acid encoding the polypeptides (e.g., effector proteins, effector partners, fusion proteins, or combinations thereof), and a guide nucleic acid or a nucleic acid encoding the guide nucleic acid are provided in different vectors. In some embodiments, the donor nucleic acid is encoded by a different vector than the vector encoding the effector protein and the guide nucleic acid.

### Lipid Particles and Non-Viral Vectors

[0333] In some embodiments, compositions and systems provided herein comprise a lipid or a lipid particle. In some embodiments, a lipid particle is a lipid nanoparticle (LNP). In some embodiments, a lipid or a lipid nanoparticle can encapsulate a nucleic acid (e.g., DNA or RNA) encoding one or more of the components as described herein. In some embodiments, a lipid or a lipid nanoparticle can encapsulate an expression vector as described herein. LNPs are a non-viral delivery system for delivery of the composition and/or system components described herein. LNPs are particularly effective for delivery of nucleic acids. Beneficial properties of LNP include ease of manufacture, low cytotoxicity and immunogenicity, high efficiency of nucleic acid encapsulation and cell transfection, multi-dosing capabilities and flexibility of design (Kulkarni et al., (2018) Nucleic Acid Therapeutics, 28 (3): 146-157). In some embodiments, compositions and methods comprise a lipid, polymer, nanoparticle, or a combination thereof, or use thereof, to introduce one or more effector proteins, one or more guide nucleic acids, one or more donor nucleic acids, or any combinations thereof to a cell. Non-limiting examples of lipids and polymers are cationic polymers, cationic lipids, ionizable lipids, or bio-responsive polymers. In some embodiments, the ionizable lipids exploits chemical-physical properties of the endosomal environment (e.g., pH) offering improved delivery of nucleic acids. In some embodiments, the ionizable lipids are neutral at physiological pH. In some embodiments, the ionizable lipids are protonated under acidic pH. In some embodiments, the bio-responsive polymer exploits chemical-physical properties of the endosomal environment (e.g., pH) to preferentially release the genetic material in the intracellular space.

[0334] In some embodiments, a LNP comprises an outer shell and an inner core. In some embodiments, the outer shell comprises lipids. In some embodiments, the lipids comprise modified lipids. In some embodiments, the modified lipids comprise pegylated lipids. In some embodiments, the lipids comprise one or more of cationic lipids, anionic lipids, ionizable lipids, and non-ionic lipids. In some embodiments, the LNP comprises one or more of N1,N3,N5-tris(3-(didodecylamino) propyl) benzene-1,3,5-tricarboxamide (TT3), 1,2-Dioleoyl-sn-glycero-3-phosphocholine (DOPC), 2-dioleoyl-sn-glycero-3-phosphoethanolamine (DOPE), 1-palmitoyl-2-oleoylsn-glycero-3-phosphoethanolamine (POPE), 1,2-distearoyl-sn-glycero-3-phosphocholine (DSPC), cholesterol (Chol), 1,2-dimyristoyl-sn-glycerol, methoxypolyethylene glycol (DMG-PEChooo), 1,2-dimyristoyl-rac-glycero-3-methoxypolyethylene glycol-2000 (DMG-PEG 2000), derivatives, analogs, or variants thereof or any combination of the foregoing. In some embodiments, the LNP comprises one or more ionizable lipid. Such ionizable lipids include, but are not limited to: 4-(dimethylamino)-butanoic acid, (10Z,13Z)-1-(9Z,12Z)-9,12-octadecadien-1-yl-10,13-nonadecadien-1-yl ester (DLin-MC3-DMA, CAS No. 1224606-06-7); N,N-dimethyl-2,2-di-(9Z,12Z)-9,12-octadecadien-1-yl-1,3-dioxolane-4-ethanamine (DLin-KC2-DMA, CAS No. 1190197-97-7); 8-[(2-hydroxyethyl) [6-oxo-6-(undecyloxy) hexyl]amino]-octanoic acid, 1-octylnonyl ester (SM-102, CAS No. 2089251-47-6); 8-[(2-hydroxyethyl) [8-(nonyloxy)-8-oxooctyl]amino]-octanoic acid, 1-octylnonyl ester (Lipid 5, CAS No. 2089251-33-0); 1,1′-[[2-[4-[2-[[2-[bis(2-hydroxydodecyl)amino]ethyl](2-hydroxydodecyl)amino]ethyl]-1-piperazinyl]ethyl]imino]bis-2-dodecanol (C12-200, CAS No. 1220890-25-4); 2-hexyl-decanoic acid, 1,1′-[[(4-hydroxybutyl)imino]di-6,1-hexanediyl]ester (ALC-0315, CAS No. 2036272-55-4); 9,12-octadecadienoic acid, (9Z,12Z)-1,1′,1″,1″-[(3,6-dioxo-2,5-piperazinediyl)bis(4,1-butanediylnitrilodi-4,1-butanediyl)]ester (OF-C4-Deg-Lin, CAS No. 1853203-01-6); bis(2-(dodecyldisulfaneyl)ethyl) 3,3′-((3-methyl-9-oxo-10-oxa-13,14-dithia-3,6-diazahexacosyl) azanediyl) dipropionate (BAMEA-016B, CAS No. 2490668-30-7); 3,6-bis[4-[bis[(9Z,12Z)-2-hydroxy-9,12-octadecadien-1-yl]amino]butyl]-2,5-piperazinedione (OF-02, CAS No. 1883431-67-1); tetrakis(8-methylnonyl) 3,3′,3″,3′″-(((methylazanediyl)bis(propane-3,1-diyl))bis(azanetriyl))tetrapropionate (3060i10, CAS No. 2322290-93-5); tetrakis(2-(octyldisulfaneyl)ethyl) 3,3′,3″,3″-(((methylazanediyl)bis(propane-3,1-diyl))bis(azanetriyl))tetrapropionate (306-012B, CAS No. 2566523-06-4); bis(2-butyloctyl) 10-(N-(3-(dimethylamino) propyl) nonanamido) nonadecanedioate (Lipid A9, CAS No. 2036272-50-9); Arcturus Lipid 2,2 (8,8) 4C CH3 (ATX-0114, CAS No. 2230647-28-4)); di((Z)-non-2-en-1-yl) 8,8′-((2-((2-(dimethylamino)ethyl) thio) acetyl) azanediyl) dioctanoate (ATX-001, CAS No. 1777792-33-2); di((Z)-non-2-en-1-yl) 8,8′-((((2-(dimethylamino)ethyl) thio) carbonyl) azanediyl) dioctanoate (ATX-002, CAS No. 1777792-34-3); Genevant CLI (CAS No. 1450888-71-7); LP01; hexa (octan-3-yl) 9,9′,9″,9′″,9″″,9′″″-((((benzene-1,3,5-tricarbonyl)yris(azanediyl))tris(propane-3,1-diyl)) tris(azanetriyl))hexanonanoate (FTT5); 5A2-SC8 (CAS No. 1857341-90-2); COATSOME® SS-OP; derivatives; analogs; or variants thereof. In some embodiments, the LNP comprise a combination of two, three, four, five or more of the foregoing ionizable lipids.

[0335] In some embodiments, the LNP has a negative net overall charge prior to complexation with one or more of a guide nucleic acid, a nucleic acid encoding the one or more guide nucleic acid, a nucleic acid encoding a polypeptide (e.g., effector protein, effector partner, fusion protein, or combinations thereof), and/or a donor nucleic acid. In some embodiments, the inner core is a hydrophobic core. In some embodiments, the one or more of a guide nucleic acid, the nucleic acid encoding the one or more guide nucleic acid, the nucleic acid encoding the polypeptide, and/or the donor nucleic acid forms a complex with one or more of the cationic lipids and the ionizable lipids. In some embodiments, the nucleic acid encoding the polypeptide or the nucleic acid encoding the guide nucleic acid is self-replicating.

[0336] In some embodiments, a LNP comprises one or more of cationic lipids, ionizable lipids, and modified versions thereof. In some embodiments, the ionizable lipid comprises TT3 or a derivative thereof. Accordingly, in some embodiments, the LNP comprises one or more of TT3 and pegylated TT3. The publication WO2016187531 is hereby incorporated by reference in its entirety, which describes representative LNP formulations in Table 2 and Table 3, and representative methods of delivering LNP formulations in Example 7.

[0337] In some embodiments, a LNP comprises a lipid composition targeting to a specific organ. In some embodiments, the lipid composition comprises lipids having a specific alkyl chain length that controls accumulation of the LNP in the specific organ (e.g., liver or spleen). In some embodiments, the lipid composition comprises a biomimetic lipid that controls accumulation of the LNP in the specific organ (e.g., brain). In some embodiments, the lipid composition comprises lipid derivatives (e.g., cholesterol derivatives) that controls accumulation of the LNP in a specific cell (e.g., liver endothelial cells, Kupffer cells, hepatocytes).

[0338] In some embodiments, the LNP described herein comprises nucleic acids (e.g., DNA or RNA) encoding an effector protein described herein, an effector partner described herein, a fusion protein described herein, a guide nucleic acid described herein, or combinations thereof. In some embodiments, the LNP comprises an mRNA that produces an effector protein described herein, an effector partner described herein, or a fusion protein described herein when translated. In some embodiments, the LNP comprises chemically modified guide nucleic acids.

### Delivery of Viral Vectors

[0339] In some embodiments, a vector described herein comprises a viral vector. In some embodiments, the viral vector comprises a nucleic acid to be delivered into a host cell by a recombinantly produced virus or viral particle. In some embodiments, the nucleic acid comprises single-stranded or double stranded, linear or circular, segmented or non-segmented. In some embodiments, the nucleic acid comprises DNA, RNA, or a combination thereof. In some embodiments, the vector is an adeno-associated viral vector. There are a variety of viral vectors that are associated with various types of viruses, including but not limited to retroviruses (e.g., lentiviruses and γ-retroviruses), adenoviruses, arenaviruses, alphaviruses, adeno-associated viruses (AAVs), baculoviruses, vaccinia viruses, herpes simplex viruses and poxviruses. In some embodiments, the vector is an adeno-associated viral (AAV) vector. In some embodiments, the viral vector is a recombinant viral vector. In some embodiments, the vector is a retroviral vector. In some embodiments, the retroviral vector is a lentiviral vector. In some embodiments, the retroviral vector comprises gamma-retroviral vector. In some embodiments, a viral vector provided herein is derived from or based on any such virus. For example, in some embodiments, the gamma-retroviral vector is derived from a Moloney Murine Leukemia Virus (MoMLV, MMLV, MuLV, or MLV) or a Murine Stem cell Virus (MSCV) genome. In some embodiments, the lentiviral vector is derived from the human immunodeficiency virus (HIV) genome. In some embodiments, the viral vector is a chimeric viral vector. In some embodiments, the chimeric viral vector comprises viral portions from two or more viruses. In some embodiments, the viral vector corresponds to a virus of a specific serotype.

[0340] In some embodiments, a viral vector is an adeno-associated viral vector (AAV vector). In some embodiments, a viral particle that delivers a viral vector described herein is an AAV. In some embodiments, the AAV comprises any AAV known in the art. In some embodiments, the viral vector corresponds to a virus of a specific AAV serotype. In some embodiments, the AAV serotype is selected from an AAV1 serotype, an AAV2 serotype, AAV3 serotype, an AAV4 serotype, AAV5 serotype, an AAV6 serotype, AAV7 serotype, an AAV8 serotype, an AAV9 serotype, an AAV10 serotype, an AAV11 serotype, an AAV12 serotype, an AAV-rh10 serotype, and any combination, derivative, or variant thereof. In some embodiments, the AAV vector is a recombinant vector, a hybrid AAV vector, a chimeric AAV vector, a self-complementary AAV (scAAV) vector, a single-stranded AAV, or any combination thereof. scAAV genomes are generally known in the art and contain both DNA strands which can anneal together to form double-stranded DNA.

[0341] In some embodiments, an AAV vector described herein is a chimeric AAV vector. In some embodiments, the chimeric AAV vector comprises an exogenous amino acid or an amino acid substitution, or capsid proteins from two or more serotypes. In some embodiments, a chimeric AAV vector is genetically engineered to increase transduction efficiency, selectivity, or a combination thereof.

[0342] In some embodiments, AAV vector described herein comprises two inverted terminal repeats (ITRs). According, in some embodiments, the viral vector provided herein comprises two inverted terminal repeats of AAV. A nucleotide sequence between the ITRs of an AAV vector provided herein comprises a sequence encoding genome editing tools. In some embodiments, the genome editing tools comprise a nucleic acid encoding one or more polypeptides (e.g., effector proteins, effector partners, fusion proteins, or combinations thereof), a nucleic acid encoding the one or more polypeptides comprising a heterologous peptide (e.g., a nuclear localization signal (NLS), polyA tail), one or more guide nucleic acids, a nucleic acid encoding the one or more guide nucleic acids, respective promoter(s), one or more donor nucleic acid, or any combinations thereof. In some embodiments, viral vectors provided herein comprise at least one promotor or a combination of promoters driving expression or transcription of one or more genome editing tools described herein. In some embodiments, a coding region of the AAV vector forms an intramolecular double-stranded DNA template thereby generating the AAV vector that is a self-complementary AAV (scAAV) vector. In some embodiments, the scAAV vector comprises the nucleotide sequence encoding genome editing tools that has a length of about 2 kb to about 3 kb. In some embodiments, the AAV vector provided herein is a self-inactivating AAV vector. In some embodiments, the AAV vector provided herein comprises a modification, such as an insertion, deletion, chemical alteration, or synthetic modification, relative to a wild-type AAV vector.

### Producing AAV Delivery Vectors

[0343] In some embodiments, methods of producing AAV delivery vectors herein comprise packaging a nucleic acid encoding a polypeptide (e.g., effector protein, effector partner, fusion protein, or combinations thereof) and a guide nucleic acid, or a combination thereof, into an AAV vector. In some embodiments, methods of producing the delivery vector comprises, (a) contacting a cell with at least one nucleic acid encoding: (i) a guide nucleic acid; (ii) a Replication (Rep) gene; and (iii) a Capsid (Cap) gene that encodes an AAV capsid protein; (b) expressing the AAV capsid protein in the cell; (c) assembling an AAV particle; and (d) packaging the polypeptide encoding nucleic acid into the AAV particle, thereby generating an AAV delivery vector. In some embodiments, promoters, stuffer sequences, and any combination thereof are packaged in the AAV vector. In some embodiments, the AAV vector is package 1, 2, 3, 4, or 5 guide nucleic acids or copies thereof. In some embodiments, the AAV vector comprises inverted terminal repeats, e.g., a 5′ inverted terminal repeat and a 3′ inverted terminal repeat. In some embodiments, the AAV vector comprises a mutated inverted terminal repeat that lacks a terminal resolution site.

[0344] In some embodiments, a hybrid AAV vector is produced by transcapsidation, e.g., packaging an inverted terminal repeat (ITR) from a first serotype into a capsid of a second serotype, wherein the first and second serotypes are not the same. In some examples, the Rep gene and ITR from a first AAV serotype (e.g., AAV2) is used in a capsid from a second AAV serotype (e.g., AAV9), wherein the first and second AAV serotypes are not the same. As a non-limiting example, a hybrid AAV serotype comprising the AAV2 ITRs and AAV9 capsid protein is indicated AAV2/9. In some examples, the hybrid AAV delivery vector comprises an AAV2/1, AAV2/2, AAV2/4, AAV2/5, AAV2/8, or AAV2/9 vector.

### Producing AAV Particles

[0345] In some embodiments, AAV particles described herein are recombinant AAV (rAAV). In some embodiments, rAAV particles are generated by transfecting AAV producing cells with an AAV-containing plasmid carrying the nucleotide sequence encoding the genome editing tools, a plasmid that carries viral encoding regions, i.e., Rep and Cap gene regions; and a plasmid that provides the helper genes such as E1A, E1B, E2A, E4ORF6 and VA. In some embodiments, the AAV producing cells are mammalian cells. In some embodiments, host cells for rAAV viral particle production are mammalian cells. In some embodiments, a mammalian cell for rAAV viral particle production is a COS cell, a HEK293T cell, a HeLa cell, a KB cell, a variant thereof, or a combination thereof. In some embodiments, rAAV virus particles can be produced in the mammalian cell culture system by providing the rAAV plasmid to the mammalian cell. In some embodiments, producing rAAV virus particles in a mammalian cell comprises transfecting vectors that express the rep protein, the capsid protein, and the gene-of-interest expression construct flanked by the ITR sequence on the 5′ and 3′ ends. Methods of such processes are provided in, for example, Naso et al., BioDrugs, 2017 August; 31 (4): 317-334 and Benskey et al., (2019), Methods Mol Biol., 1937:3-26, each of which is incorporated by reference in their entireties.

[0346] In some embodiments, rAAV is produced in a non-mammalian cell. In some embodiments, rAAV is produced in an insect cell. In some embodiments, the insect cell for producing rAAV viral particles comprises a Sf9 cell. In some embodiments, production of rAAV virus particles in insect cells comprises infecting the insect cells with baculovirus. In some embodiments, production of rAAV virus particles in insect cells comprises infecting the insect cells with three recombinant baculoviruses, one carrying the cap gene, one carrying the rep gene, and one carrying the gene-of-interest expression construct enclosed by an ITR on both the 5′ and 3′ end. In some embodiments, rAAV virus particles are produced by the One Bac system. In some embodiments, rAAV virus particles can be produced by the Two Bac system. In some embodiments, in the Two Bac system, the rep gene and the cap gene of the AAV is integrated into one baculovirus virus genome, and the ITR sequence and the gene-of-interest expression construct is integrated into another baculovirus virus genome. In some embodiments, in the One Bac system, an insect cell line that expresses both the rep protein and the capsid protein is established and infected with a baculovirus virus integrated with the ITR sequence and the gene-of-interest expression construct. Details of such processes are provided in, for example, Smith et. al., (1983), Mol. Cell. Biol., 3 (12): 2156-65; Urabe et al., (2002), Hum. Gene. Ther., 1; 13 (16): 1935-43; and Benskey et al., (2019), Methods Mol Biol., 1937:3-26, each of which is incorporated by reference in its entirety.

### IX. Target Nucleic Acids

[0347] Disclosed herein are compositions, systems and methods for detecting and/or editing a target nucleic acid. In some embodiments, the target nucleic acid is a double stranded nucleic acid. In some embodiments, the target nucleic acid is a single stranded nucleic acid. Alternatively, or in combination, the target nucleic acid is a double stranded nucleic acid and is prepared into single stranded nucleic acids before or upon contacting an RNP. In some embodiments, the single stranded nucleic acid comprises a RNA, wherein the RNA comprises a mRNA, a rRNA, a tRNA, a non-coding RNA, a long non-coding RNA, a microRNA (miRNA), and a single-stranded RNA (ssRNA). In some embodiments, the target nucleic acid is complementary DNA (cDNA) synthesized from a single-stranded RNA template in a reaction catalyzed by a reverse transcriptase. In some embodiments, the target nucleic acid comprises an RNA, a DNA, or combination thereof. In some embodiments, guide nucleic acids described herein hybridize to a portion of the target nucleic acid. In some embodiments, the target nucleic acid is from a virus, a parasite, or a bacterium described herein.

[0348] In some embodiments, a target nucleic acid comprising a target sequence comprises a PAM sequence. In some embodiments, the PAM sequence is adjacent to the target sequence. In some embodiments, the PAM sequence is 3′ to the target sequence. In some embodiments, the PAM sequence is directly 3′ to the target sequence. In some embodiments, the PAM sequence 5′ to the target sequence. In some embodiments, the PAM sequence is directly 5′ to the target sequence. In some embodiments, the target nucleic acid as described in the methods herein does not initially comprise a PAM sequence. However, any target nucleic acid of interest that is generated using the methods described herein to comprise a PAM sequence, and thus be a PAM target nucleic acid. A PAM target nucleic acid, as used herein, refers to a target nucleic acid that has been amplified to insert a PAM sequence that is recognized by a polypeptide system.

[0349] In some embodiments, a target nucleic acid comprises 5 to 100, 5 to 90, 5 to 80, 5 to 70, 5 to 60, 5 to 50, 5 to 40, 5 to 30, 5 to 25, 5 to 20, 5 to 15, or 5 to 10 linked nucleotides. In some embodiments, the target nucleic acid comprises 10 to 90, 20 to 80, 30 to 70, or 40 to 60 linked nucleotides. In some embodiments, the target nucleic acid comprises 5, 6, 7, 8, 9, 10, 11, 12, 13, 14, 15, 16, 17, 18, 19, 20, 21, 22, 23, 24, 25, 26, 27, 28, 29, 30, 31, 32, 33, 34, 35, 36, 37, 38, 39, 40, 45, 50, 60, 70, 80, 90, or 100 linked nucleotides. In some embodiments, the target nucleic acid comprises at least 10, at least 20, at least 30, at least 40, at least 50, at least 60, at least 70, at least 80, at least 90, or at least 100 linked nucleotides. In some embodiments, the target sequence in the target nucleic acid comprises at least 10 contiguous nucleotides that are complementary to the guide nucleic acid or engineered guide nucleic acid.

[0350] In some embodiments, compositions, systems, and methods described herein comprise a target nucleic acid that comprises a nucleotide, a nucleotide sequence, a coding sequence, a gene, an exon, an intron, a gene regulatory region, a fragment thereof, or combinations thereof. In some embodiments, the gene regulatory region comprises a promotor, an enhancer, or a combination thereof.

[0351] In some embodiments, compositions, systems, and methods described herein comprise a target nucleic acid that is responsible for a disease, contain a mutation (e.g., single strand polymorphism, point mutation, insertion, or deletion), be contained in an amplicon, or be uniquely identifiable from the surrounding nucleic acids (e.g., contain a unique sequence of nucleotides). In some embodiments, the target nucleic acid has undergone a modification (e.g., an editing) after contacting with an RNP. In some embodiments, the editing is a change in the nucleotide sequence of the target nucleic acid. In some embodiments, the change comprises an insertion, deletion, or substitution of one or more nucleotides compared to the target nucleic acid that has not undergone any modification.

[0352] In some embodiments, a target nucleic acid comprises a portion or a specific region of a nucleic acid from a genomic locus, any DNA amplicon of, a reverse transcribed mRNA, or a cDNA from a gene described herein. In some embodiments, the target nucleic acid is an amplicon of at least a portion of a gene. Non-limiting examples of genes are recited in TABLE 10. In some embodiments, the target nucleic acid comprises a nucleotide sequence comprising any one of the genes recited in TABLE 10, a variant thereof, a promoter thereof, an enhancer thereof, or a portion thereof. Nucleic acid sequences of target nucleic acids and/or corresponding genes are readily available in public databases as known and used in the art. In some embodiments, the target nucleic acid is selected from any one of the genes recited in TABLE 10, a variant thereof, a promoter thereof, an enhancer thereof, or a portion thereof. In some embodiments, the target nucleic acid comprises one or more target sequences. In some embodiments, the one or more target sequence is within the target nucleic acid of any one of the genes recited in TABLE 10.

[0353] Non-limiting examples of nucleotide sequences of genes are recited in TABLE 11. In some embodiments, the target nucleic acid comprises a nucleotide sequence that is at least 65%, at least 70%, at least 75%, at least 80%, at least 85%, at least 90%, at least 95%, at least 97%, at least 98%, at least 99%, or 100% identical to any one of the nucleotide sequences set forth in TABLE 11. In some embodiments, the target nucleic acid comprises one or more target sequences. In some embodiments, the one or more target sequence is within any one of the nucleotide sequences recited in TABLE 11. In some embodiments, the target nucleic acid comprises any one of the following genes: BCL11A, B2M, PNPLA2, CHD4, CIITA, GATA1, HBA, HBA1, HBA2, β-globin gene (HBB), HBD, HBE, HBE1, HBG1, HBG2, HBM, HBQ1, HBZ, HOXA9, KLF1, MBD3, MYB, TRAC1, ZBTB7A, a fragment thereof, a promoter thereof, an enhancer thereof, or a combination thereof. In some embodiments, the target nucleic acid comprises any one of the following genes: BCL11A, HBB, HBG1, HBG2, a fragment thereof, a promoter thereof, an enhancer thereof, or a combination thereof. In some embodiments, the HBG gene comprises γ-globin 1 gene (HBG1 gene), γ-globin 2 gene (HBG2 gene), G γ-globin gene, A γ-globin gene, a fragment thereof, a promoter thereof, an enhancer thereof, or a combination thereof. In some embodiments, the target nucleic acid comprises a HBB gene, a fragment thereof, an enhancer thereof or a promoter thereof. In some embodiments, the HBB gene comprises a EV6 mutation.

[0354] In some embodiments, the target nucleic acid is a naturally occurring eukaryotic sequence, an engineered eukaryotic sequence, a fragment of a naturally occurring sequence, a fragment of an engineered sequence, or combinations thereof.

[0355] Nucleic acids, such as DNA and pre-mRNA, described herein can contain at least one intron and at least one exon, wherein as read in the 5′ to the 3′ direction of a nucleic acid strand, the 3′ end of an intron can be adjacent to the 5′ end of an exon, and wherein said intron and exon correspond for transcription purposes. If a nucleic acid strand contains more than one intron and exon, the 5′ end of the second intron is adjacent to the 3′ end of the first exon, and 5′ end of the second exon is adjacent to the 3′ end of the second intron. The junction between an intron and an exon can be referred to herein as a splice junction, wherein a 5′ splice site (SS) can refer to the +1/+2 position at the 5′ end of intron and a 3′SS can refer to the last two positions at the 3′ end of an intron. Alternatively, a 5′ SS can refer to the 5′ end of an exon and a 3′SS can refer to the 3′ end of an exon. In some embodiments, nucleic acids can contain one or more elements that act as a signal during transcription, splicing, and/or translation. In some embodiments, signaling elements include a 5′SS, a 3′SS, a premature stop codon, U1 and/or U2 binding sequences, and cis acting elements such as branch site (BS), polypyridine tract (PYT), exonic and intronic splicing enhancers (ESEs and ISEs) or silencers (ESSs and ISSs). In some embodiments, nucleic acids also comprise an untranslated region (UTR), such as a 5′ UTR or a 3′ UTR. In some embodiments, the start of an exon or intron is referred to interchangeably herein as the 5′ end of an exon or intron, respectively. Likewise, in some embodiments, the end of an exon or intron is referred to interchangeably herein as the 3′ end of an exon or intron, respectively.

[0356] In some embodiments, at least a portion of at least one target sequence is within 1, about 5 or more, about 10 or more, about 15 or more, about 20 or more, about 25 or more, about 30 or more, about 35 or more, about 40 or more, about 45 or more, about 50 or more, about 55 or more, about 60 or more, about 65 or more, about 70 or more, about 75 or more, about 80 or more, about 85 or more, about 90 or more, about 95 or more, about 100 or more, about 105 or more, about 110 or more, about 115 or more, about 120 or more, about 125 or more, about 130 or more, about 135 or more, about 140 or more, about 145 or more, or about 150 to about 300 nucleotides adjacent to: the 5′ end of an exon; the 3′ end of an exon; the 5′ end of an intron; the 3′ end of an intron; one or more signaling element comprising a 5′SS, a 3′SS, a premature stop codon, U1 binding sequence, U2 binding sequence, a BS, a PYT, ESE, an ISE, an ESS, an ISS; a 5′ UTR; a 3′ UTR; more than one of the foregoing, or any combination thereof. In some embodiments, the target nucleic acid comprises a target locus. In some embodiments, the target nucleic acid comprises more than one target loci. In some embodiments, the target nucleic acid comprises two target loci. Accordingly, in some embodiments, the target nucleic acid can comprise one or more target sequences.

[0357] In some embodiments, compositions, systems, and methods described herein comprise an edited target nucleic acid which can describe a target nucleic acid wherein the target nucleic acid has undergone a change, for example, after contact with a polypeptide (e.g., an effector protein, an effector partner, a fusion protein, or a combination thereof). In some embodiments, the editing is an alteration in the nucleotide sequence of the target nucleic acid. In some embodiments, the edited target nucleic acid comprises a nicked target strand or a nicked non-target strand. In some embodiments, the edited target nucleic acid comprises an insertion, deletion, or replacement of one or more nucleotides compared to the unedited target nucleic acid. In some embodiments, the editing is a mutation.

[0358] In some embodiments, the target nucleic acid comprises at least one mutation relative to corresponding wildtype nucleotide sequence. In some embodiments, the at least one mutation results in a single nuclear polymorphism (SNP). In some embodiments, the at least one mutation is associated with any one of diseases or disorders listed in TABLE 12. In some embodiments, the at least one mutation is associated with a genetic blood disease or disorder. In some embodiments, the at least one mutation is associated with sickle cell anemia, sickle cell disease (SCD), and/or β-thalassemia. In some embodiments, the target nucleic acid is within a eukaryotic gene (e.g., a human gene, a mammal gene).

[0359] In some embodiments, the target nucleic acid comprises any one of the genes recited in TABLE 11, a fragment thereof, a promoter thereof, an enhancer thereof, or a combination thereof. In some embodiments, the target nucleic acid comprises a nucleotide sequence that is at least 85% identical to any one of the nucleotide sequences set forth in TABLE 11. In some embodiments, the target nucleic acid comprises any one of BCL11A gene, B2M gene, PNPLA2 gene, (HD) 4 gene, CIITA gene, GATA1 gene, HBA gene, HBA1 gene, HBA2 gene, HBB gene, HBD gene, HBE1 gene, HBG gene, HBG1 gene, HBG2 gene, HBM gene, HBQ1 gene, HBZ gene, HOXA9 gene, KLF1 gene, MBD3 gene, MYB gene, TRAC gene, ZBTB7A gene, a variant thereof, a fragment thereof, a promoter thereof, an enhancer thereof, or a combination thereof. In some embodiments, the target nucleic acid comprises any one of the following genes: BCL11A, B2M, PNPLA2, CHD4, CIITA, GATA1, HBA, HBA1, HBA2, β-globin gene (HBB gene), HBD, HBE, HBE1, HBG, γ-globin 1 gene (HBG1 gene), γ-globin 2 gene (HBG2 gene), HBM, HBQ1, HBZ, HOXA9, KLF1, MBD3, MYB, TRAC1, ZBTB7A, a fragment thereof, a promoter thereof, an enhancer thereof, or a combination thereof. A sequence representing a human wildtype allele of any one of the target nucleic acids described above may be found in the NCBI database. In some embodiments, a target nucleic acid comprises a gene encoding hemoglobin protein, a hemoglobin subunit, or a portion thereof. In some embodiments, the target nucleic acids comprise a nucleotide sequence encoding C2H2 type zinc-finger protein, Chromodomain Helicase DNA Binding Protein 4 (CHD4) GATA1 protein, Glioma pathogenesis-related protein 1 (GLIPR1), globin protein, alpha-globin protein, beta globin protein, gamma globin chain, hemoglobin A (HbA) protein, fetal hemoglobin (HbF), HBE1 protein, HBZ protein, hemoglobin subunit epsilon, hemoglobin subunit zeta, HBM protein, HBQ1 protein, HOXA9 protein, KLF1 protein, MBD3 protein, MYB protein, TRAC protein, ZBTB protein, a functional fragment thereof, a promoter thereof, an enhancer thereof, or a combination thereof.

[0360] In some embodiments, a target nucleic acid described herein comprises HBB gene, a variant thereof, a fragment thereof, a promoter thereof, an enhancer thereof, or a combination thereof. Accordingly, in some embodiments, the target nucleic acid encodes beta-globin protein (e.g., a subunit of the larger hemoglobin protein), or a functional portion thereof. HBB gene encodes β-globin protein. The HBB gene contains 3 exons and is located on chromosome 11, at cytogenetic location 11p15.4. A sequence representing a human wildtype allele of HBB may be found in the NCBI database with gene accession ID: NC_000011.10. sequence representing human wildtype HBB mRNA (also a sense strand of human HBB cDNA) may be found in the Ensembl database with accession number: ENST00000335295.4. In some embodiments, a variant of the HBB gene comprises at least on mutation in the HBB gene. In some embodiments, the at least one mutation results in a Single Nuclear Polymorphism (SNP). In some embodiments, the at least one mutation in the HBB gene is E6V mutation. In some embodiments, the at least one mutation in the HBB gene is associated with a genetic blood disease or disorder. In some embodiments, the genetic disease or disorder comprises sickle cell anemia, sickle cell disease, β-thalassemia, or a combination thereof.

[0361] In some embodiments, a target nucleic acid described herein comprises HBG1 gene and/or HBG2 gene. The HBA1 gene and the HBA2 gene together forms the alpha-globin locus. In some embodiments, the target nucleic acid comprises HBA gene. The HBA gene encodes alpha-globin protein. β-globin protein and alpha-globin protein together forms hemoglobin A (HbA) protein. Accordingly, in some embodiments, the target nucleic acid comprises the HBB gene and the HBA gene. Accordingly, in some embodiments, the target nucleic acid comprises a nucleotide sequence encoding the alpha-globin locus, hemoglobin A (HbA) protein, a variant thereof, or a functional portion thereof.

[0362] In some embodiments, a target nucleic acid described herein comprises HBG1 gene or HBG2 gene. Each, the HBG1 gene and the HBG2 gene, encodes gamma globin chains involved in creating fetal hemoglobin (HbF). Two gamma globin chains and two alpha globin chains forms fetal hemoglobin (HbF). Accordingly, in some embodiments, the target nucleic acid comprises the HBG1 gene and the HBB gene. Alternatively, in some embodiments, the target nucleic acid comprises the HBG2 gene and the HBB gene. Accordingly, in some embodiments, the target nucleic acid comprises a nucleotide sequence encoding the gamma globin chain, fetal hemoglobin (HbF), a variant thereof, or a functional portion thereof.

[0363] In some embodiments, a target nucleic acid described herein comprises HBD gene. The HBD gene encodes hemoglobin subunit delta protein. Accordingly, in some embodiments, the target nucleic acid comprises a nucleotide sequence encoding the hemoglobin subunit delta protein, a variant thereof, or a functional portion thereof.

[0364] In some embodiments, a target nucleic acid described herein comprises BCL11A gene. The BCL11A gene encodes a C2H2 type zinc-finger protein, which is a transcriptional repressor that decreases fetal hemoglobin (HbF) expression in adult tissues. Accordingly, in some embodiments, the target nucleic acid comprises a nucleotide sequence encoding the C2H2 type zinc-finger protein, a variant thereof, or a functional portion thereof.

[0365] In some embodiments, a target nucleic acid described herein comprises a CHI) 4 (Chromodomain Helicase DNA Binding Protein 4) gene. The CHD4 gene encodes ATP-Dependent Helicase CHD4. Accordingly, in some embodiments, the target nucleic acid comprises a nucleotide sequence encoding the CHD4 protein, a variant thereof, or a functional portion thereof.

[0366] In some embodiments, a target nucleic acid described herein comprises a GATA1 gene. The GATA1 gene encodes a GATA1 protein, which is involved in the specialization (differentiation) of immature blood cells. Accordingly, in some embodiments, the target nucleic acid comprises a nucleotide sequence encoding the GATA1 protein, a variant thereof, or a functional portion thereof.

[0367] In some embodiments, a target nucleic acid described herein comprises a B2M (beta-2-microglobulin) gene. The B2M gene encodes a B2M protein. Accordingly, in some embodiments, the target nucleic acid comprises a nucleotide sequence encoding the B2M protein, a variant thereof, or a functional portion thereof.

[0368] In some embodiments, a target nucleic acid described herein comprises a HBD) (Hemoglobin Subunit Delta) gene. The HBD gene encodes hemoglobin subunit delta protein. Accordingly, in some embodiments, the target nucleic acid comprises a nucleotide sequence encoding the HBD protein, a variant thereof, or a functional portion thereof.

[0369] In some embodiments, a target nucleic acid described herein comprises a HBE1 gene, a HBZ gene, or a combination thereof. The HBE1 gene encodes HBE1 protein. The HBZ gene encodes a HBZ protein. The HBE1 protein and the HBZ protein together forms hemoglobin subunits that is found in the early embryo. Accordingly, in some embodiments, the target nucleic acid comprises a nucleotide sequence encoding the HBE1 protein, HBZ protein, a variant thereof, a functional portion thereof or a combination thereof.

[0370] In some embodiments, a target nucleic acid described herein comprises a HBM (Hemoglobin Subunit Mu) gene. The HBM gene encodes HBM protein. Accordingly, in some embodiments, the target nucleic acid comprises a nucleotide sequence encoding the HBM protein, a variant thereof, or a functional portion thereof.

[0371] In some embodiments, a target nucleic acid described herein comprises a HBQ1 (Hemoglobin Subunit Theta 1) gene. The HBQ1 gene encodes a HBQ1 protein. Accordingly, in some embodiments, the target nucleic acid comprises a nucleotide sequence encoding the HBQ1 protein, a variant thereof, or a functional portion thereof.

[0372] In some embodiments, a target nucleic acid described herein comprises a HOXA9 (Homeobox A9) gene. The HOXA9 gene encodes HOXA9 protein. The HOXA9 protein is a homeodomain-containing transcription factor which is involved in enhancing blood formation (e.g., stem cell expansion, differentiation, B and T-cell development). Accordingly, in some embodiments, the target nucleic acid comprises a nucleotide sequence encoding the HOXA9 protein, a variant thereof, or a functional portion thereof.

[0373] In some embodiments, a target nucleic acid described herein comprises a KLF1 (Krueppel-like factor 1) gene. The KLF1 gene encodes a KLF1 protein. The KLF1 is a hematopoietic-specific transcription factor that induces high-level expression of adult beta-globin and other erythroid (red blood) genes. Accordingly, in some embodiments, the target nucleic acid comprises a nucleotide sequence encoding the KLF1 protein, a variant thereof, or a functional portion thereof.

[0374] In some embodiments, a target nucleic acid described herein comprises a MBD3 (Methyl-CpG Binding Domain Protein 3) gene. The MBD3 gene encodes a MBD3 protein. The MBD3 protein is an epigenetic regulator, which facilitates lineage commitment of pluripotent cells and is important for stem cell homeostasis in blood and skin). Accordingly, in some embodiments, the target nucleic acid comprises a nucleotide sequence encoding the MBD3 protein, a variant thereof, or a functional portion thereof.

[0375] In some embodiments, a target nucleic acid described herein comprises an oncogene. In some embodiments, the oncogene comprises a MYB (MYB Proto-Oncogene, Transcription Factor) gene. The MYB gene encodes a MYB protein (member of the MYB (myeloblastosis) family of transcription factors). Accordingly, in some embodiments, the target nucleic acid comprises a nucleotide sequence encoding the MYB protein, a variant thereof, or a functional portion thereof.

[0376] In some embodiments, a target nucleic acid described herein comprises a TRAC (T Cell Receptor Alpha Constant) gene. The TRAC gene encodes a TRAC protein. The TRAC protein is a T cell receptor that recognizes foreign antigens. Accordingly, in some embodiments, the target nucleic acid comprises a nucleotide sequence encoding the TRAC protein, a variant thereof, or a functional portion thereof.

[0377] In some embodiments, a target nucleic acid described herein comprises a ZBTB7A (Zinc Finger And BTB Domain Containing 7A) gene. The ZBTB7A gene encodes ZBTB protein. The ZBTB protein is a transcription factor (member of the C2H2 zinc finger protein family) involved in cell differentiation and proliferation. Accordingly, in some embodiments, the target nucleic acid comprises a nucleotide sequence encoding a protein from C2H2 zinc finger protein family. In some embodiments, the C2H2 zinc finger protein family comprises ZBTB protein, a variant thereof, or a functional portion thereof.

### Donor Nucleic Acid

[0378] In some embodiments, a donor nucleic acid comprises a nucleic acid that is incorporated into a target nucleic acid or target sequence.

[0379] In some embodiments, a donor nucleic acid comprises a transgene. Accordingly, provided herein are transgene for use with the compositions, systems and methods of the disclosure. In some embodiments, the transgene comprises a nucleotide sequence that is inserted into a cell for expression of said nucleotide sequence in the cell. In some embodiments, the transgene comprises (1) a nucleotide sequence that is not naturally found in the cell (e.g., a heterologous nucleotide sequence); (2) a nucleotide sequence that is a mutant form of a nucleotide sequence naturally found in the cell into which it has been introduced; (3) a nucleotide sequence that serves to add additional copies of the same (e.g., exogenous or homologous) or a similar nucleotide sequence naturally occurring in the cell into which it has been introduced; or (4) a silent naturally occurring or homologous nucleotide sequence whose expression is induced in the cell into which it has been introduced. A donor nucleic acid can comprise a transgene. The cell in which transgenes expression occur can be a target cell, such as a host cell.

[0380] In some embodiments, the donor nucleic acid comprises single-stranded DNA or linear double-stranded DNA. In some embodiments, the donor nucleic acid comprises a nucleotide sequence encoding a functional polypeptide and/or wherein the donor nucleic acid comprises a wildtype sequence. In some embodiments, the donor nucleic acid comprises a naturally occurring sequence. In some embodiments, the naturally occurring sequence does not contain a mutation.

[0381] In some embodiments, the donor nucleic acid comprises a nucleotide, a nucleotide sequence, a coding sequence, a gene, an exon, an intron, a gene regulatory region, a fragment thereof, or combinations thereof. In some embodiments, the fragment is at least 10, at least 20, at least 30, at least 40, at least 50, at least 60, at least 70, or at least 80 contiguous nucleotides.

[0382] In some embodiments, a donor nucleic acid of any suitable size is integrated into a target nucleic acid or a genome. In some embodiments, the donor nucleic acid integrated into the target nucleic acid or the genome is less than 3, about 3, 3.5, 4, 4.5, 5, 5.5, 6, 6.5, 7, 7.5, 8, 8.5, 9, 9.5, 10, 10.5, 11, 11.5, 12, 12.5, 13, 13.5, 14, 14.5, 15, 16, 17, 18, 19, 20, 25, 30, 35, 40, 45, 50, 100, 150, 200, 250, 300, 350, 400, 450, 500 kilobases in length. In some embodiments, the donor nucleic acid is more than 500 kilobases (kb) in length.

[0383] In some embodiments, a viral vector comprising a donor nucleic acid introduces the donor nucleic acid into a cell following transfection. In some embodiments, the donor nucleic acid is introduced into the cell by any mechanism of the transfecting viral vector, including, but not limited to, integration into the genome of the cell or introduction of an episomal plasmid or viral genome.

[0384] In some embodiments, the donor nucleic acid comprises any one of the following human genes: HBA gene, HBA1 gene, HBA2 gene, HBB gene, HBD gene, HBE1 gene, HBG gene, HBG1 gene, HBG2 gene, HBM gene, HBQ1 gene, HBZ gene, HOXA9 gene, KLF1 gene, MBD3 gene, a fragment thereof, a promoter thereof, an enhancer thereof, or a combination thereof. Accordingly, in some embodiments, a transgene described herein comprises any one of HBA gene, HBA1 gene, HBA2 gene, HBB gene, HBD) gene, HBE1 gene, HBG gene, HBG1 gene, HBG2 gene, HBM gene, HBQ1 gene, HBZ gene, HOXA9 gene, KLF1 gene, MBD3 gene, KIT gene, a variant thereof, a fragment thereof, a promoter thereof, an enhancer thereof, or a combination thereof. In some embodiments, the transgene comprise a nucleotide sequence encoding globin protein, alpha-globin protein, beta globin protein, gamma globin chain, hemoglobin A (HbA) protein, fetal hemoglobin (HbF), HBE1 protein, HBZ protein, hemoglobin subunit epsilon, hemoglobin subunit zeta, HBM protein, HBQ1 protein, HOXA9 protein, KLF1 protein, MBD3 protein, CD117 protein, MYB protein, a functional fragment thereof, a promoter thereof, an enhancer thereof, or a combination thereof.

[0385] In some embodiments, an effector protein as described herein facilitates insertion of a donor nucleic acid at a site of cleavage or between two cleavage sites by cleaving (hydrolysis of a phosphodiester bond) of a nucleic acid resulting in a nick or double strand break-nuclease activity.

[0386] In some embodiments, a donor nucleic acid serves as a template in the process of homologous recombination, which carries an alteration that is to be or has been introduced into a target nucleic acid. By using the donor nucleic acid as a template, the genetic information, including the alteration, is copied into the target nucleic acid by way of homologous recombination.

[0387] In some embodiments, a donor nucleic acid is inserted at a cleavage site within the target nucleic acid, wherein the cleavage site is generated by an effector protein or fusion protein described herein. In some embodiments, the donor nucleic acid encodes an amino acid sequence of a functional human protein. In some embodiments, the functional human protein has at least 50%, at least 60%, at least 70%, at least 80%, at least 90%, at least 100%, at least 110%, at least 120%, at least 130%, at least 140%, at least 150%, at least 180%, at least 200%, at least 300%, at least 400% enzymatic activity compared to wildtype.

[0388] In some embodiments, the functional human protein comprises wildtype protein. Specific examples of functional human proteins include wildtype and engineered versions of proteins that is deficient, under-expressed or aberrantly expressed in certain human subjects. In some embodiments, these subjects suffer from disorders that result in deficiency, or aberrant expression of these proteins. Compositions and methods provided herein are useful for treating conditions characterized by such deficiency, or aberrant expression.

[0389] In some embodiments, the wildtype protein comprises human wildtype protein sequence. In some embodiments, the human protein comprises an amino acid sequence that is associated with any one of diseases recited in TABLE 12.

### Mutations

[0390] In some embodiments, target nucleic acids described herein comprise a mutation. In some embodiments, a composition, system or method described herein can be used to edit a target nucleic acid comprising a mutation such that the mutation is edited to be the wild-type nucleotide or nucleotide sequence. In some embodiments, a composition, system or method described herein can be used to detect a target nucleic acid comprising a mutation. In some embodiments, a mutation results in the insertion of at least one amino acid in a protein encoded by the target nucleic acid. In some embodiments, a mutation results in the deletion of at least one amino acid in a protein encoded by the target nucleic acid. In some embodiments, a mutation results in the substitution of at least one amino acid in a protein encoded by the target nucleic acid. A mutation that results in the deletion, insertion, or substitution of one or more amino acids of a protein encoded by the target nucleic acid results in misfolding of a protein encoded by the target nucleic acid. In some embodiments, a mutation results in a premature stop codon, thereby resulting in a truncation of the encoded protein.

[0391] Non-limiting examples of mutations are insertion-deletion (indel), a point mutation, single nucleotide polymorphism (SNP), a chromosomal mutation, a copy number mutation or variation, and frameshift mutations. In some embodiments, an indel mutation is an insertion or deletion of one or more nucleotides. In some embodiments, a point mutation comprises a substitution, insertion, or deletion. In some embodiments, a frameshift mutation occurs when the number of nucleotides in the insertion/deletion is not divisible by three, and it occurs in a protein coding region. In some embodiments, a chromosomal mutation can comprise an inversion, a deletion, a duplication, or a translocation of one or more nucleotides. In some embodiments, a copy number variation can comprise a gene amplification or an expanding trinucleotide repeat. In some embodiments, an SNP is associated with a phenotype of the sample or a phenotype of the organism from which the sample was taken. In some embodiments, an SNP is associated with altered phenotype from wild type phenotype. In some embodiments, the SNP is a synonymous substitution or a nonsynonymous substitution. In some embodiments, the nonsynonymous substitution is a missense substitution or a nonsense point mutation. In some embodiments, the synonymous substitution is a silent substitution. In some embodiments, the mutation is associated with one or more of protein expression, protein activity, and protein structural stability.

[0392] In some embodiments, a target nucleic acid described herein comprises a mutation of one or more nucleotides. In some embodiments, the one or more nucleotides comprises 1, 2, 3, 4, 5, 6, 7, 8, 9, 10, 11, 12, 13, 14, 15, 16, 17, 18, 19, 20 or more nucleotides. In some embodiments, the mutation comprises a deletion, insertion, and/or substitution of about 5, about 10, about 15, about 20, about 25, about 30, about 35, about 40, about 45, about 50, about 55, about 60, about 65, about 70, about 75, about 80, about 85, about 90, about 95, about 100, about 200, about 300, about 400, about 500, about 600, about 700, about 800, about 900, or about 1000 nucleotides. In some embodiments, the mutation comprises a deletion, insertion, and/or substitution of 1 to 5, 5 to 10, 10 to 15, 15 to 20, 20 to 25, 25 to 30, 30 to 35, 35 to 40, 40 to 45, 45 to 50, 50 to 55, 55 to 60, 60 to 65, 65 to 70, 70 to 75, 75 to 80, 80 to 85, 85 to 90, 90 to 95, 95 to 100, 100 to 200, 200 to 300, 300 to 400, 400 to 500, 500 to 600, 600 to 700, 700 to 800, 800 to 900, 900 to 1000, 1 to 50, 1 to 100, 25 to 50, 25 to 100, 50 to 100, 100 to 500, 100 to 1000, or 500 to 1000 nucleotides. In some embodiments, the mutation is located in a non-coding region or a coding region of a gene, wherein the gene is a target nucleic acid. In some embodiments, a mutation is in an open reading frame of a target nucleic acid. In some embodiments, guide nucleic acids described herein hybridize to a portion of the target nucleic acid comprising or adjacent to the mutation.

[0393] In some embodiments, the target nucleic acid comprises one or more mutations. In some embodiments, the target nucleic acid comprises one or more, two or more, three or more, four or more, five or more, six or more, seven or more, eight or more, nine or more, or ten or more mutations as compared to the unmutated target nucleic acid. In some embodiments, the target nucleic acid comprises a sequence comprising one or more, two or more, three or more, four or more, five or more, six or more, seven or more, eight or more, nine or more, or ten or more mutations as compared to the wildtype sequence. In some embodiments, the target nucleic acid comprises a mutation associated with a disease or disorder.

[0394] In some embodiments, target nucleic acids comprise a mutation, wherein the mutation is a SNP. In some embodiments, the single nucleotide mutation or SNP is associated with a phenotype of the sample or a phenotype of the organism from which the sample was taken. In some embodiments, the SNP is associated with altered phenotype from wild type phenotype. In some embodiments, a single nucleotide mutation, SNP, or deletion described herein is associated with a disease, such as a genetic disease. In some embodiments, the SNP is a synonymous substitution or a nonsynonymous substitution. In some embodiments, the nonsynonymous substitution is a missense substitution or a nonsense point mutation. In some embodiments, the synonymous substitution is a silent substitution. In some embodiments, the mutation is a deletion of one or more nucleotides. In some embodiments, the single nucleotide mutation, SNP, or deletion is associated with a disease such as a genetic disorder. In some embodiments, the mutation, such as a single nucleotide mutation, a SNP, or a deletion, is encoded in the nucleotide sequence of a target nucleic acid from the germline of an organism or is encoded in a target nucleic acid from a diseased cell.

[0395] In some embodiments, the mutation is associated with a disease, such as a genetic disorder. In some embodiments, the mutation is encoded in the nucleotide sequence of a target nucleic acid from the germline of an organism or is encoded in a target nucleic acid from a diseased cell. In some embodiments, a target nucleic acid described herein comprises a mutation associated with a disease. In some examples, a mutation associated with a disease refers to a mutation whose presence in a subject indicates that the subject is susceptible to or suffers from, a disease, disorder, condition, or syndrome. In some examples, a mutation associated with a disease refers to a mutation which causes, contributes to the development of, or indicates the existence of the disease, disorder, condition, or syndrome. In some embodiments, a mutation associated with a disease is also refer to any mutation which generates transcription or translation products at an abnormal level, or in an abnormal form, in cells affected by a disease relative to a control without the disease. In some examples, a mutation associated with a disease refers to a mutation whose presence in a subject indicates that the subject is susceptible to, or suffers from, a disease, disorder, or pathological state. In some embodiments, a mutation associated with a disease, comprises the co-occurrence of a mutation and the phenotype of a disease. In some embodiments, the mutation occurs in a gene, wherein transcription or translation products from the gene occur at a significantly abnormal level or in an abnormal form in a cell or subject harboring the mutation as compared to a non-disease control subject not having the mutation.

[0396] In some embodiments, a target nucleic acid described herein comprises a mutation associated with a disease, wherein the target nucleic acid comprises any one of the following genes: BCL11A, B2M, PNPLA2, CHD4, CIITA, GATA1, HBA, HBA1, HBA2, 8-globin gene (HBB gene), HBD, HBE, HBE1, HBG, γ-globin 1 gene (HBG1 gene), γ-globin 2 gene (HBG2 gene), HBM, HBQ1, HBZ, HOXA9, KLF1, MBD3, MYB, TRAC1, ZBTB7A, a fragment thereof, a promoter thereof, an enhancer thereof, or a combination thereof. In some embodiments, the target nucleic acid comprises any one of the following genes: BCL11A, HBB, HBG1, HBG2, a fragment thereof, a promoter thereof, an enhancer thereof, or a combination thereof. In some embodiments, the target nucleic acid comprises a ε-globin gene, γ-globin gene (HBG1 gene), G γ-globin gene, A γ-globin gene, δ-globin gene, β-globin gene (HBB gene), a fragment thereof, a promoter thereof, an enhancer thereof, or a combination thereof. In some embodiments, the target nucleic acid comprises a HBB gene, a fragment thereof, a promoter thereof, an enhancer thereof, or combinations thereof. In some embodiments, the target nucleic acid comprises a EV6 mutation in the HBB gene. In some embodiments, the target nucleic acid comprises HBG1 gene, HBG2 gene, HBB gene, BCL11A gene, human B2M gene, human CIITA gene, human TRAC1 gene or a combination thereof. In some embodiments, the target nucleic acid comprises one or more nucleotide alterations at one or more positions relative to corresponding reference nucleotide sequence of TABLE 11. In some embodiments, the target nucleic acid comprises one or more nucleotide substitution at one or more positions relative to corresponding reference nucleotide sequence of TABLE 11. In some embodiments, the BCL11A gene, the HBB gene, the HBG1 gene and the HBG2 gene comprises one or more nucleotide alterations at one or more positions relative to SEQ ID NO: 836, 844, 847 and 848, respectively. In some embodiments, the BCL11A gene, the HBB gene, the HBG1 gene and the HBG2 gene comprises one or more nucleotide substitutions at one or more positions relative to SEQ ID NO: 836, 844, 847 and 848, respectively. Alternative nucleotides can be any one or more of A, C, G, T or U, or a deletion, or an insertion.

[0397] Disclosed herein are compositions comprising one or more polypeptides (e.g., effector proteins, effector partners, fusion proteins, or combinations thereof) described herein or nucleic acids encoding the one or more polypeptides, one or more guide nucleic acids described herein or nucleic acids encoding the one or more guide nucleic acids described herein, or combinations thereof. In some embodiments, repeat sequences of the one or more guide nucleic acids are capable of interacting with the one or more of the effector proteins. In some embodiments, spacer sequences of the one or more guide nucleic acids hybridizes with a target sequence of a target nucleic acid. In some embodiments, the compositions comprise one or more donor nucleic acids described herein. In some embodiments, the compositions are capable of editing a target nucleic acid in a cell or a subject. In some embodiments, the compositions are capable of editing a target nucleic acid or the expression thereof in a cell, in a tissue, in an organ, in vitro, in vivo, or ex vivo. In some embodiments, the compositions are capable of editing a target nucleic acid in a sample comprising the target nucleic.

[0398] In some embodiments, compositions described herein comprise plasmids described herein, viral vectors described herein, non-viral vectors described herein, or combinations thereof. In some embodiments, compositions described herein comprise the viral vectors. In some embodiments, compositions described herein comprise an AAV. In some embodiments, compositions described herein comprise liposomes (e.g., cationic lipids or neutral lipids), dendrimers, lipid nanoparticle (LNP), or cell-penetrating peptides. In some embodiments, compositions described herein comprise an LNP.

### X. Pharmaceutical Compositions and Modes of Administration

[0399] Described herein are formulations of introducing compositions or components of a system described herein to a host.

[0400] In some embodiments, compositions described herein are pharmaceutical compositions. In some embodiments, the pharmaceutical compositions comprise compositions described herein, systems described herein, vectors described herein, engineered HSCs described herein, or combinations thereof. In some embodiments, the pharmaceutical compositions further comprise pharmaceutically acceptable carrier. In some embodiments, the pharmaceutical composition comprises a pharmaceutically acceptable salt, one or more of a vehicle, adjuvant, excipient, or carrier, such as a filler, disintegrant, a surfactant, a binder, a lubricant, or combinations thereof. Remington: The Science and Practice of Pharmacy, 21st edition, 2005, ed. D. B. Troy, Lippincott Williams & Wilkins, Philadelphia; Encyclopedia of Pharmaceutical Technology, eds. J. Swarbrick and J. C. Boylan, 1988-1999, Marcel Dekker, New York; and Encyclopedia of Pharmaceutical Technology, eds. J. Swarbrick, 2015, CRC Press, Boca Raton disclose various carriers used in formulating pharmaceutically acceptably compositions and known techniques for the preparation thereof. Non-limiting examples of pharmaceutically acceptable carriers and diluents suitable for the pharmaceutical compositions disclosed herein include buffers (e.g., neutral buffered saline, phosphate buffered saline); carbohydrates (e.g., glucose, mannose, sucrose, dextran, mannitol); polypeptides or amino acids (e.g., glycine); antioxidants; chelating agents (e.g., EDTA, glutathione); adjuvants (e.g., aluminum hydroxide); surfactants (Polysorbate 80, Polysorbate 20, or Pluronic F68); glycerol; sorbitol; mannitol; polyethyleneglycol; and preservatives. In some embodiments, the vector is formulated for delivery through injection by a needle carrying syringe. In some embodiments, the composition is formulated for delivery by electroporation. In some embodiments, the composition is formulated for delivery by chemical method. In some embodiments, the pharmaceutical compositions comprise a virus vector or a non-viral vector.

[0401] Pharmaceutical compositions described herein comprise a salt. In some embodiments, the salt is a sodium salt. In some embodiments, the salt is a potassium salt. In some embodiments, the salt is a magnesium salt. In some embodiments, the salt is NaCl. In some embodiments, the salt is KNO₃. In some embodiments, the salt is Mg²⁺SO₄²⁻.

[0402] Pharmaceutical compositions described herein are in the form of a solution (e.g., a liquid). In some embodiments, the solution is formulated for injection, e.g., intravenous or subcutaneous injection. In some embodiments, the pH of the solution is about 7, about 7.1, about 7.2, about 7.3, about 7.4, about 7.5, about 7.6, about 7.7, about 7.8, about 7.9, about 8, about 8.1, about 8.2, about 8.3, about 8.4, about 8.5, about 8.6, about 8.7, about 8.8, about 8.9, or about 9. In some embodiments, the pH is 7 to 7.5, 7.5 to 8, 8 to 8.5, 8.5 to 9, or 7 to 8.5. In some cases, the pH of the solution is less than 7. In some cases, the pH is greater than 7.

### XI. Systems

[0403] Disclosed herein, in some aspects, are systems for modifying, or editing a target nucleic acid, comprising (i) a polypeptide or a nucleic acid encoding the polypeptide, wherein the polypeptide comprises an effector protein, an effector partner, a fusion protein or a combination thereof, and (ii) a guide nucleic acid, or a nucleic acid encoding the guide nucleic acid described herein. In some embodiments systems for modifying, or editing a target nucleic acid, comprising the effector proteins or nucleic acids encoding the effector proteins described herein, or a multimeric complex thereof.

[0404] In some embodiments, the one or more components individually comprises one or more of the following: (i) an effector protein, or a nucleic acid encoding the effector protein; (ii) an effector partner, or a nucleic acid encoding the effector partner; (iii) a fusion protein, or a nucleic acid encoding the fusion protein; and (iv) a guide nucleic acid, or a nucleic acid encoding the guide nucleic acid. In some embodiments, systems are used for modifying or editing a target nucleic acid. In some embodiments, systems are used for inserting a donor nucleic acid into a target nucleic acid. In some embodiments, systems comprise an effector protein or a nucleic acid encoding the effector protein described herein, a guide nucleic acid or a nucleic acid encoding the guide nucleic acid a reagent described herein, a donor nucleic acid described herein, support medium, or a combination thereof. In some embodiments, the effector protein comprises an effector protein, or a fusion protein thereof, described herein. In some embodiments, effector proteins comprise an amino acid sequence that is at least 70%, at least 75%, at least 80%, at least 85%, at least 90%, at least 95%, or 100% identical to any one of the nucleotide sequences recited in TABLE 1. In some embodiments, effector proteins comprise an amino acid sequence that is at least 70%, at least 75%, at least 80%, at least 85%, at least 90%, at least 95%, or 100% similar to any one of the nucleotide sequences recited in TABLE 1. In some embodiments, the guide nucleic acid comprises at least one nucleotide sequence selected from the nucleotide sequences recited in any one of TABLE 5, TABLE 6, TABLE 7, TABLE 8 and TABLE 9. In some embodiments, the target nucleic acid comprises a nucleotide sequence that is at least 70%, at least 75%, at least 80%, at least 85%, at least 90%, at least 95%, or 100% identical to any one of the nucleotide sequences recited in TABLE 11. In some embodiments, the donor nucleic acid comprises a nucleotide sequence encoding an amino acid sequence that is associated with any one of the diseases recited in TABLE 12. In some embodiments, the system edits the target nucleic acid in vivo.

[0405] Also disclosed herein are systems for modifying a target nucleic acid in cells. In some embodiments, systems for modifying a target nucleic acid in a cell, the system comprising: (i) a polypeptide, or a nucleic acid encoding the polypeptide, wherein the polypeptide comprises an amino acid sequence that is at least 85% identical to any one of the amino acid sequences set forth in TABLE 1; and (ii) an engineered guide nucleic acid, or a nucleic acid encoding the engineered guide nucleic acid, wherein: (a) the engineered guide nucleic acid comprises a first region and a second region, (b) the first region at least partially binds to the polypeptide to form an RNP complex, (c) the second region comprises a nucleic acid that is complementary or the reverse complement of the target nucleic acid, (d) the second region hybridizes to the target nucleic acid, (e) the RNP complex upon hybridization of the second region to the target nucleic modifies the target nucleic acid of the cell, and (f) the first region and the second region are heterologous to each other. In some embodiments, the nucleic acid encoding the polypeptide, the nucleic acid encoding the engineered guide nucleic acid, or both are mRNA. In some embodiments, the system further comprises a donor nucleic acid.

[0406] Also disclosed herein are systems for modifying a target nucleic acid in a cell. In some embodiments, the systems comprise: (a) an engineered guide nucleic acid, or a nucleic acid encoding the engineered guide nucleic acid, wherein: (i) the engineered guide nucleic acid comprises a first region and a second region, (ii) the second region comprises a nucleotide sequence that is at least 80% identical to any one of repeat sequences recited in TABLE 5 or intermediary sequences recited in TABLE 8, (iii) the second region comprises a nucleotide sequence that is at least 80% identical to any one of spacer sequences recited in TABLE 7, and (iv) the first region and the second region are heterologous to each other; and (b) a polypeptide, or a nucleic acid encoding the polypeptide, wherein: (i) the polypeptide at least partially binds to the first region to form an RNP complex, (ii) the RNP complex, upon hybridization of the second region to the target nucleic, modifies the target nucleic acid of the cell. In some embodiments, the polypeptide comprises an amino acid sequence that is at least 85% identical to any one of the amino acid sequences set forth in TABLE 1. In some embodiments, the nucleic acid encoding the polypeptide, the nucleic acid encoding the engineered guide nucleic acid, or both are mRNA. In some embodiments, the system further comprises a donor nucleic acid.

[0407] Also disclosed herein are systems for modifying a target nucleic acid in a hematopoietic stem cell (HSC). In some embodiments, systems for modifying a target nucleic acid in a HSC, the system comprising: (i) a polypeptide, or a nucleic acid encoding the polypeptide, wherein the polypeptide comprises an amino acid sequence that is at least 85% identical to any one of the amino acid sequences set forth in TABLE 1; and (ii) an engineered guide nucleic acid, or a nucleic acid encoding the engineered guide nucleic acid, wherein: (a) the engineered guide nucleic acid comprises a first region and a second region, (b) the first region at least partially binds to the polypeptide to form an RNP complex, (c) the second region comprises a nucleic acid that is complementary or the reverse complement of the target nucleic acid, (d) the second region hybridizes to the target nucleic acid, (e) the RNP complex upon hybridization of the second region to the target nucleic modifies the target nucleic acid of the HSC, and (f) the first region and the second region are heterologous to each other. In some embodiments, the nucleic acid encoding the polypeptide, the nucleic acid encoding the engineered guide nucleic acid, or both are mRNA. In some embodiments, the system further comprises a donor nucleic acid.

[0408] In some embodiments, the systems for modifying a target nucleic acid in a HSC described herein comprise an RNP complex comprising a polypeptide, and an engineered guide nucleic acid, wherein the polypeptide at least partially binds to a first region of the engineered guide nucleic acid. In some embodiments, the RNP complex, upon hybridization of a second region of the engineered guide nucleic acid to the target nucleic acid, modifies the target nucleic acid in the HSC. In some embodiments, the HSC, following modification of the target nucleic acid by the RNP complex, retains cell viability relative to an unmodified HSC. In some embodiments, the HSC, following modification of the target nucleic acid by the RNP complex, retains cell proliferation relative to an unmodified HSC. In some embodiments, the HSC, following modification of the target nucleic acid by the RNP complex, retains multi-lineage development potential relative to an unmodified HSC.

[0409] In some embodiments, the systems for modifying a target nucleic acid in a HSC, the system comprising: (i) a polypeptide, or a nucleic acid encoding the polypeptide, wherein the polypeptide comprises an amino acid sequence that is at least 85% identical to any one of the amino acid sequences set forth in TABLE 1; and (ii) an engineered guide nucleic acid, or a nucleic acid encoding the engineered guide nucleic acid, wherein: (a) the engineered guide nucleic acid comprises a first region and a second region, (b) the polypeptide at least partially binds to the first region to form an RNP complex, (c) the second region comprises a nucleotide sequence that is complementary or the reverse complement of a target sequence of the target nucleic acid, (d) the RNP complex, upon hybridization of the second region to the target nucleic, modifies the target nucleic acid of the HSC, and (e) the first region and the second region are heterologous to each other, and (f) the HSC following modification by the RNP complex retains at least one of cell viability, cell proliferation, and multi-lineage development potential relative to an unmodified HSC.

[0410] In some embodiments, a system described herein comprises at least two engineered guide nucleic acids selected from: (a) a first engineered guide nucleic acid comprising a spacer sequence that is at least 90% identical or complementary to an equal length portion of a target sequence of a gene encoding the HBB gene, a promoter thereof, an enhancer thereof, or a fragment thereof; (b) a second engineered guide nucleic acid comprising a spacer sequence that is at least 90% identical or complementary to an equal length portion of a target sequence of a gene encoding the BCL11A gene, a promoter thereof, an enhancer thereof, or a fragment thereof; (c) a third engineered guide nucleic acid comprising a spacer sequence that is at least 90% identical or complementary to an equal length portion of a target sequence of a gene encoding the HBG1 gene, a promoter thereof, an enhancer thereof, or a fragment thereof; and (d) a fourth engineered guide nucleic acid comprising a spacer sequence that is at least 90% identical or complementary to an equal length portion of a target sequence of a gene encoding the HBG2 gene, a promoter thereof, an enhancer thereof, or a fragment thereof.

[0411] In some embodiments, the system further comprises an antibody conjugated to one or more components of any one of the systems described herein, wherein the antibody recognizes and binds HSC. In some embodiments, the antibody recognizes CD34+ and CD117.

### Additional System Components

[0412] In some embodiments, systems include a package, carrier, or container that is compartmentalized to receive one or more containers such as vials, tubes, and the like, each of the container(s) comprising one of the separate elements to be used in a method described herein. Suitable containers include, for example, test wells, bottles, vials, syringes, and test tubes. In some embodiments, the containers are formed from a variety of materials such as glass, plastic, or polymers. In some embodiments, the system or systems described herein contain packaging materials. Examples of packaging materials include, but are not limited to, pouches, blister packs, bottles, tubes, bags, containers, bottles, and any packaging material suitable for intended mode of use.

[0413] In some embodiments, systems described herein include labels listing contents and/or instructions for use, or package inserts with instructions for use. In some embodiments, the systems include a set of instructions and/or a label is on or associated with the container. In some embodiments, the label is on a container when letters, numbers or other characters forming the label are attached, molded, or etched into the container itself; a label is associated with a container when it is present within a receptacle or carrier that also holds the container (e.g., as a package insert). In some embodiments, the label is used to indicate that the contents are to be used for a specific therapeutic application. In some embodiments, the label indicates directions for use of the contents, such as in the methods described herein. In some embodiments, after packaging the formed product and wrapping or boxing to maintain a sterile barrier, the product is terminally sterilized by heat sterilization, gas sterilization, gamma irradiation, or by electron beam sterilization. Alternatively, in some embodiments, the product is prepared and packaged by aseptic processing.

[0414] In some embodiments, systems comprise a solid support. In some embodiments, an RNP or effector protein is attached to a solid support. In some embodiments, the solid support comprises an electrode or a bead. In some embodiments, the bead comprises a magnetic bead. Upon cleavage, the RNP is liberated from the solid support and interacts with other mixtures. For example, upon cleavage of the nucleic acid of the RNP, the effector protein of the RNP flows through a chamber into a mixture comprising a substrate. When the effector protein meets the substrate, a reaction occurs, such as a colorimetric reaction, which is then detected. As another example, the protein is an enzyme substrate, and upon cleavage of the nucleic acid of the enzyme substrate-nucleic acid, the enzyme flows through a chamber into a mixture comprising the enzyme. When the enzyme substrate meets the enzyme, a reaction occurs, such as a calorimetric reaction, which is then detected.

### XII. Methods and Formulations for Introducing System Components and Compositions into a Target Cell

[0415] Disclosed herein, in some aspects, are systems and methods for introducing systems and components of such systems into a target cell. Such systems may comprise, as described herein, one or more components having any one of the polypeptides (e.g., effector proteins, effector partners, fusion proteins, or combination thereof) or a nucleic acid comprising a nucleotide sequence encoding same. In some embodiments, such systems comprise, as described herein, one or more components having a guide nucleic acid or a nucleic acid comprising a nucleotide sequence encoding same. In some embodiments, systems comprise one or more components having a guide nucleic acid and an additional nucleic acid. Systems and components thereof may be used to introduce the polypeptides, guide nucleic acids, or combinations thereof into a target cell. Such methods may be used to modify or edit a target nucleic acid. In some embodiments, systems comprise the polypeptide, one or more guide nucleic acids, and a reagent for facilitating the introduction of the polypeptide and the one or more guide nucleic acids. In some embodiments, system components for the methods comprise a solution, a buffer, a reagent for facilitating the introduction of the polypeptide and the one or more guide nucleic acids, or combinations thereof. A guide nucleic acid (or a nucleic acid comprising a nucleotide sequence encoding same) and/or a polypeptide (e.g., effector protein, effector partner, fusion protein, or combination thereof) (or a nucleic acid comprising a nucleotide sequence encoding same) described herein may be introduced into a host cell by any of a variety of well-known methods. As a non-limiting example, the guide nucleic acid and/or polypeptide may be combined with a lipid. As another non-limiting example, the guide nucleic acid and/or polypeptide may be combined with a particle or formulated into a particle.

### Methods for Introducing Systems and Compositions to a Host

[0416] Described herein are methods of introducing various components described herein to a host. A host may be any suitable host. In some embodiments, a host comprises a host cell. When described herein, a host cell comprises an in vivo or in vitro eukaryotic cell, a prokaryotic cell (e.g., bacterial or archaeal cell), or a cell from a multicellular organism (e.g., a cell line) cultured as a unicellular entity. In some embodiments, eukaryotic or prokaryotic cells are, or have been, used as recipients for methods of introduction described herein. In some embodiments, eukaryotic or prokaryotic cells comprise the progeny of the original cell which has been transformed by the methods of introduction described herein. It is understood that the progeny of a single cell is not necessarily be completely identical in morphology or in genomic or total DNA complement as the original parent, due to natural, accidental, or deliberate mutation. In some embodiments, a host cell comprises a recombinant host cell or a genetically modified host cell, if a heterologous nucleic acid, e.g., an expression vector, has been introduced into the cell.

[0417] Methods of introducing a nucleic acid and/or protein into a host cell are known in the art, and any convenient method may be used to introduce a subject nucleic acid (e.g., an expression construct/vector) into a target cell (e.g., a human cell, and the like). Suitable methods include, e.g., viral infection, transfection, conjugation, protoplast fusion, lipofection, electroporation, calcium phosphate precipitation, polyethyleneimine (PEI)-mediated transfection, DEAE-dextran mediated transfection, liposome-mediated transfection, particle gun technology, calcium phosphate precipitation, direct micro injection, nanoparticle-mediated nucleic acid delivery (see, e.g., Panyam et al. Adv Drug Deliv Rev. 2012 Sep. 13. pii: S0169-409X (12) 00283-9. doi: 10.1016/j.addr.2012.09.023), and the like. In some embodiments, the nucleic acid and/or protein(s) are introduced into a disease cell comprised in a pharmaceutical composition comprising the guide nucleic acid, the polypeptide, a pharmaceutically acceptable excipient, or combinations thereof.

[0418] In some embodiments, molecules of interest, such as nucleic acids of interest, are introduced to a host. In some embodiments, polypeptides are introduced to a host. In some embodiments, vectors, such as lipid particles and/or viral vectors are introduced to a host. In some embodiments, introduction is for contact with a host or for assimilation into the host, for example, introduction into a host cell.

[0419] In some embodiments, described herein are methods of introducing one or more nucleic acids, such as a nucleic acid encoding a polypeptide, a nucleic acid that, when transcribed, produces an engineered guide nucleic acid, or combinations thereof, into a host cell. Any suitable method may be used to introduce a nucleic acid into a cell. Suitable methods include, for example, viral infection, transfection, lipofection, electroporation, calcium phosphate precipitation, polyethyleneimine (PEI)-mediated transfection, DEAE-dextran mediated transfection, liposome-mediated transfection, particle gun technology, calcium phosphate precipitation, direct microinjection, nanoparticle-mediated nucleic acid delivery, and the like. Further methods are described throughout.

[0420] In some embodiments, introducing one or more nucleic acids into a host cell occurs in any culture media and under any culture conditions that promote the survival of the cells. In some embodiments, introducing one or more nucleic acids into a host cell is carried out in vivo or ex vivo. In some embodiments, introducing one or more nucleic acids into a host cell is carried out in vitro.

[0421] In some embodiments, polypeptides (e.g., effector proteins, effector partners, fusion proteins, or combination thereof) are provided as RNA. In some embodiments, the RNA is provided by direct chemical synthesis or is transcribed in vitro from a DNA (e.g., encoding the polypeptide). Once synthesized, the RNA is introduced into a cell by way of any suitable technique for introducing nucleic acids into cells (e.g., microinjection, electroporation, transfection, etc.). In some embodiments, introduction of one or more nucleic acid is through the use of a vector and/or a vector system, accordingly, in some embodiments, compositions and system described herein comprise a vector and/or a vector system.

[0422] In some embodiments, vectors are introduced directly to a host. In some embodiments, host cells are contacted with one or more vectors as described herein, and in some embodiments, said vectors are taken up by the cells. Methods for contacting cells with vectors include but are not limited to electroporation, calcium chloride transfection, microinjection, lipofection, micro-injection, contact with the cell or particle that comprises a molecule of interest, or a package of cells or particles that comprise molecules of interest.

[0423] In some embodiments, components described herein are introduced directly to a host. For example, in some embodiments, an engineered guide nucleic acid is introduced to a host, specifically introduced into a host cell. Methods of introducing nucleic acids, such as RNA into cells include, but are not limited to direct injection, transfection, or any other method used for the introduction of nucleic acids.

[0424] In some embodiments, polypeptides (e.g., effector proteins, effector partners, fusion proteins, or combination thereof) described herein are introduced directly to a host. In some embodiments, polypeptides described herein are modified to promote introduction to a host. For example, in some embodiments, polypeptides described herein are modified to increase the solubility of the polypeptide. In some embodiments, the polypeptide is optionally fused to a polypeptide domain that increases solubility. In some embodiments, the domain is linked to the polypeptide through a defined protease cleavage site, such as TEV sequence which is cleaved by TEV protease. In some embodiments, the linker comprises one or more flexible sequences, e.g., from 1 to 10 glycine residues. In some embodiments, the cleavage of the polypeptide is performed in a buffer that maintains solubility of the product, e.g., in the presence of from 0.5 to 2 M urea, in the presence of polypeptides and/or polynucleotides that increase solubility, and the like. Domains of interest include endosomolytic domains, e.g., influenza HA domain; and other polypeptides that aid in production, e.g., IF2 domain, GST domain, GRPE domain, and the like. In another example, the polypeptide is modified to improve stability. For example, the polypeptides is PEGylated, where the polyethyleneoxy group provides for enhanced lifetime in the blood stream. In some embodiments, polypeptides are modified to promote uptake by a host, such as a host cell. For example, a polypeptide described herein is fused to a polypeptide permeant domain to promote uptake by a host cell. Any suitable permeant domains may be used in the non-integrating polypeptides of the present disclosure, including peptides, peptidomimetics, and non-peptide carriers. Examples include penetratin, a permeant peptide that is derived from the third alpha helix of Drosophila melanogaster transcription factor Antennapaedia; the HIV-1 tat basic region amino acid sequence, e.g., amino acids 49-57 of a naturally-occurring tat protein; and poly-arginine motifs, for example, the region of amino acids 34-56 of HIV-1 rev protein, nonaarginine, octa-arginine, and the like. In some embodiments, the site at which the fusion is made is selected in order to optimize the biological activity, secretion or binding characteristics of the polypeptide. In some embodiments, the optimal site is determined by suitable methods.

### Formulations for Introducing Systems and Compositions to a Host

[0425] Described herein are formulations of introducing compositions or components of a system described herein to a host. In some embodiments, such formulations, systems and compositions described herein comprise polypeptides (e.g., effector proteins, effector partners, fusion proteins, or combination thereof) and a carrier (e.g., excipient, diluent, vehicle, or filling agent). In some aspects of the present disclosure, the polypeptides are provided in a pharmaceutical composition comprising the polypeptides and any pharmaceutically acceptable excipient, carrier, or diluent.

### XIII. Methods of Modifying a Nucleic Acid

[0426] Provided herein are compositions, methods, and systems for modifying (e.g., editing) target nucleic acids. In general, modifying refers to changing the physical composition of a target nucleic acid. However, compositions, methods, and systems disclosed herein are capable of modifying target nucleic acids, such as making epigenetic modifications of target nucleic acids, which does not change the nucleotide sequence of the target nucleic acids per se. In some embodiments, polypeptides (e.g., effector proteins, effector partners, fusion proteins, or combination thereof), compositions and systems described herein are used for modifying a target nucleic acid, which includes editing a target nucleic acid sequence. In some embodiments, modifying a target nucleic acid comprises one or more of: cleaving the target nucleic acid, deleting one or more nucleotides of the target nucleic acid, inserting one or more nucleotides into the target nucleic acid, mutating one or more nucleotides of the target nucleic acid, or otherwise changing one or more nucleotides of the target nucleic acid. In some embodiments, modifying a target nucleic acid comprises one or more of: methylating, demethylating, deaminating, or oxidizing one or more nucleotides of the target nucleic acid.

[0427] In some embodiments, compositions, methods, and systems described herein modify a coding portion of a gene, a non-coding portion of a gene, or a combination thereof. In some embodiments, modifying at least one gene using the compositions, methods or systems described herein reduce or increase expression of one or more genes. In some embodiments, the compositions, methods or systems reduce expression of one or more genes by at least 10%, at least 20%, at least 30%, at least 40%, at least 50%, at least 60%, at least 70%, at least 80%, at least 90%, or at least 95%. In some embodiments, the compositions, methods or systems remove all expression of a gene, also referred to as genetic knock out. In some embodiments, the compositions, methods or systems increase expression of one or more genes by at least 10%, at least 20%, at least 30%, at least 40%, at least 50%, at least 60%, at least 70%, at least 80%, at least 90%, or at least 100%.

[0428] In some embodiments, the compositions, methods or systems comprise a nucleic acid expression vector, or use thereof, to introduce polypeptides (e.g., effector proteins, effector partners, fusion proteins, or combination thereof), guide nucleic acid, donor template or any combination thereof to a cell. In some embodiments, the nucleic acid expression vector is a viral vector. Viral vectors include, but are not limited to, retroviruses, adenoviruses, adeno-associated viruses, and herpes simplex viruses. In some embodiments, the viral vector is a replication-defective viral vector, comprising an insertion of a therapeutic gene inserted in genes essential to the lytic cycle, preventing the virus from replicating and exerting cytotoxic effects. In some embodiments, the viral vector is an adeno associated viral (AAV) vector. In some embodiments, the nucleic acid expression vector is a non-viral vector. In some embodiments, compositions and methods comprise a lipid, polymer, nanoparticle, or a combination thereof, or use thereof, to introduce the polypeptide, guide nucleic acid, donor template or any combination thereof to a cell. Non-limiting examples of lipids and polymers are cationic polymers, cationic lipids, or bio-responsive polymers. In some embodiments, the bio-responsive polymer exploits chemical-physical properties of the endosomal environment (e.g., pH) to preferentially release the genetic material in the intracellular space.

[0429] In some embodiments, methods of modifying comprise contacting a target nucleic acid with one or more components, compositions or systems described herein. In some embodiments, a method of modifying comprises contacting a target nucleic acid with at least one of: a) one or more polypeptides (e.g., effector proteins, effector partners, fusion proteins, or combination thereof), or one or more nucleic acids encoding the one or more polypeptides; or b) one or more guide nucleic acids, or one or more nucleic acids encoding one or more guide nucleic acids. In some embodiments, a method of modifying comprises contacting a target nucleic acid with a system described herein wherein the system comprises components comprising at least one of: a) one or more polypeptides (e.g., effector proteins, effector partners, fusion proteins, or combination thereof), or one or more nucleic acids encoding the one or more polypeptides; or b) one or more guide nucleic acids, or one or more nucleic acids encoding one or more guide nucleic acids. In some embodiments, a method of modifying comprises contacting a target nucleic acid with a composition described herein comprising at least one of: a) one or more polypeptides (e.g., effector proteins, effector partners, fusion proteins, or combination thereof), or one or more nucleic acids encoding the one or more polypeptides; or b) one or more guide nucleic acids, or one or more nucleic acids encoding one or more guide nucleic acids; in a composition. In some embodiments, a method of modifying as described herein produces a modified target nucleic acid.

[0430] In some embodiments, editing a target nucleic acid sequence introduces a mutation (e.g., point mutations, deletions) in a target nucleic acid relative to a corresponding wildtype nucleotide sequence. In some embodiments, editing removes or corrects a disease-causing mutation in a nucleic acid sequence to produce a corresponding wildtype nucleotide sequence. In some embodiments, editing a target nucleic acid sequence removes/corrects point mutations, deletions, null mutations, or tissue-specific mutations in a target nucleic acid. In some embodiments, editing a target nucleic acid sequence is used for generating gene knock-out, gene knock-in, gene editing, gene tagging, or a combination thereof. In some embodiments, methods of the disclosure are targeted to any locus in a genome of a cell.

[0431] In some embodiments, modifying comprises single stranded cleavage, double stranded cleavage, donor nucleic acid insertion, epigenetic modification (e.g., methylation, demethylation, acetylation, or deacetylation), or a combination thereof. In some embodiments, cleavage (single-stranded or double-stranded) is site-specific, meaning cleavage occurs at a specific site in the target nucleic acid, often within the region of the target nucleic acid that hybridizes with the guide nucleic acid spacer sequence. In some embodiments, the polypeptides (e.g., effector proteins, effector partners, fusion proteins, or combination thereof) introduce a single-stranded break in a target nucleic acid to produce a cleaved nucleic acid. In some embodiments, the polypeptide is capable of introducing a break in a single stranded RNA (ssRNA). In some embodiments, the polypeptide is coupled to a guide nucleic acid that targets a particular region of interest in the ssRNA. In some embodiments, the target nucleic acid, and the resulting cleaved nucleic acid is contacted with a nucleic acid for homologous recombination (e.g., homology directed repair (HDR)) or non-homologous end joining (NHEJ). In some embodiments, a double-stranded break in the target nucleic acid is repaired (e.g., by NHEJ or HDR) without insertion of a donor template, such that the repair results in an indel in the target nucleic acid at or near the site of the double-stranded break. In some embodiments, an indel, sometimes referred to as an insertion-deletion or indel mutation, is a type of genetic mutation that results from the insertion and/or deletion of one or more nucleotide in a target nucleic acid. In some embodiments, an indel varies in length (e.g., 1 to 1,000 nucleotides in length) and be detected using methods well known in the art, including sequencing. If the number of nucleotides in the insertion/deletion is not divisible by three, and it occurs in a protein coding region, it is also a frameshift mutation. Indel percentage is the percentage of sequencing reads that show at least one nucleotide has been mutation that results from the insertion and/or deletion of nucleotides regardless of the size of insertion or deletion, or number of nucleotides mutated. For example, if there is at least one nucleotide deletion detected in a given target nucleic acid, it counts towards the percent indel value. As another example, if one copy of the target nucleic acid has one nucleotide deleted, and another copy of the target nucleic acid has 10 nucleotides deleted, they are counted the same. This number reflects the percentage of target nucleic acids that are edited by a given polypeptide.

[0432] In some embodiments, methods of modifying described herein cleave a target nucleic acid at one or more locations to generate a cleaved target nucleic acid. In some embodiments, the cleaved target nucleic acid undergoes recombination (e.g., NHEJ or HDR). In some embodiments, cleavage in the target nucleic acid is repaired (e.g., by NHEJ or HDR) without insertion of a donor nucleic acid, such that the repair results in an indel in the target nucleic acid at or near the site of the cleavage site. In some embodiments, cleavage in the target nucleic acid is repaired (e.g., by NHEJ or HDR) with insertion of a donor nucleic acid, such that the repair results in an indel in the target nucleic acid at or near the site of the cleavage site.

[0433] In some embodiments, wherein the compositions, systems, and methods of the present disclosure restore a wild-type reading frame. In some embodiments, a wild-type reading frame comprises a reading frame that produces at least a partially, or fully, functional protein. In some embodiments, a non-wild-type reading frame comprises a reading frame that produces a non-functional or partially non-functional protein.

[0434] Accordingly, in some embodiments, compositions, systems, and methods described herein edit 1 to 1,000 nucleotides or any integer in between, in a target nucleic acid. In some embodiments, 1 to 1,000, 2 to 900, 3 to 800, 4 to 700, 5 to 600, 6 to 500, 7 to 400, 8 to 300, 9 to 200, or 10 to 100 nucleotides, or any integer in between, are edited by the compositions, systems, and methods described herein. In some embodiments, 1, 2, 3, 4, 5, 6, 7, 8, 9, 10, or more nucleotides are edited by the compositions, systems, and methods described herein. In some embodiments, 10, 20, 30, 40, 50, 60, 70, 80 90, 100 or more nucleotides, or any integer in between, are edited by the compositions, systems, and methods described herein. In some embodiments, 100, 200, 300, 400, 500, 600, 700, 800, 900 or more nucleotides, or any integer in between, are edited by the compositions, systems, and methods described herein.

[0435] In some embodiments, methods comprise use of two or more polypeptides (e.g., effector proteins, effector partners, fusion proteins, or combination thereof). An illustrative method for introducing a break in a target nucleic acid comprises contacting the target nucleic acid with: (a) a first engineered guide nucleic acid comprising a region that binds to a first polypeptide described herein; and (b) a second engineered guide nucleic acid comprising a region that binds to a second polypeptide described herein, wherein the first engineered guide nucleic acid comprises an additional region that hybridizes to the target nucleic acid and wherein the second engineered guide nucleic acid comprises an additional region that hybridizes to the target nucleic acid. In some embodiments, the first and second polypeptide are identical. In some embodiments, the first and second polypeptide are not identical.

[0436] In some embodiments, editing a target nucleic acid comprises genome editing. In some embodiments, genome editing comprises editing a genome, chromosome, plasmid, or other genetic material of a cell or organism. In some embodiments, the genome, chromosome, plasmid, or other genetic material of the cell or organism is modified in vivo. In some embodiments, the genome, chromosome, plasmid, or other genetic material of the cell or organism is modified in a cell. In some embodiments, the genome, chromosome, plasmid, or other genetic material of the cell or organism is modified in vitro. For example, in some embodiments, a plasmid is edited in vitro using a composition described herein and introduced into a cell or organism.

[0437] In some embodiments, editing a target nucleic acid comprises deleting a sequence from a target nucleic acid. For example, in some embodiments, a mutated sequence or a sequence associated with a disease is removed from a target nucleic acid. In some embodiments, editing a target nucleic acid comprises replacing a sequence in a target nucleic acid with a second nucleotide sequence. For example, in some embodiments, a mutated sequence or a sequence associated with a disease is replaced with a second nucleotide sequence lacking the mutation or that is not associated with the disease. In some embodiments, editing a target nucleic acid comprises deleting or replacing a sequence comprising markers associated with a disease or disorder. In some embodiments, editing a target nucleic acid comprises introducing a sequence into a target nucleic acid. For example, in some embodiments, a beneficial sequence or a sequence that reduces or eliminates a disease is inserted into the target nucleic acid.

[0438] In some embodiments, methods comprise inserting a donor nucleic acid into a cleaved target nucleic acid. In some embodiments, the donor nucleic acid is inserted at a specified (e.g., effector protein targeted) point within the target nucleic acid. In some embodiments, the cleaved target nucleic acid is cleaved at a single location. In such embodiments, the methods comprise contacting a target nucleic acid with an effector protein described herein, thereby introducing a single-stranded break in the target nucleic acid; and contacting the target nucleic acid with a donor nucleic acid for homologous recombination, optionally by HDR or NHEJ, thereby introducing a new sequence into the target nucleic acid (e.g., at a cleavage site). In some embodiments, the cleaved target nucleic acid is cleaved at two locations. In such embodiments, the methods comprise contacting a target nucleic acid with an effector protein described herein, thereby introducing a single-stranded break in the target nucleic acid; contacting the target nucleic acid with a second effector protein described herein, to generate a second cleavage site in the target nucleic acid, ligating the regions flanking the first and second cleavage site, optionally through NHEJ or single-strand annealing, thereby resulting in the excision of a portion of the target nucleic acid between the first and second cleavage sites from the target nucleic acid; and contacting the target nucleic acid with a donor nucleic acid for homologous recombination, optionally by HDR or NHEJ, thereby introducing a new sequence into the target nucleic acid (e.g., in between two cleavage sites).

[0439] In some embodiments, methods comprise editing a target nucleic acid with two or more polypeptides (e.g., effector proteins, effector partners, fusion proteins, or combination thereof). In some embodiments, editing a target nucleic acid comprises introducing a two or more single-stranded breaks in a target nucleic acid. In some embodiments, a break is introduced by contacting a target nucleic acid with an effector protein and a guide nucleic acid. In some embodiments, the guide nucleic acid binds to the effector protein and hybridizes to a region of the target nucleic acid, thereby recruits the effector protein to the region of the target nucleic acid. In some embodiments, binding of the effector protein to the guide nucleic acid and the region of the target nucleic acid activate the effector protein, and activated effector protein introduces a break (e.g., a single stranded break) in the region of the target nucleic acid. In some embodiments, editing a target nucleic acid comprises introducing a first break in a first region of the target nucleic acid and a second break in a second region of the target nucleic acid. For example, in some embodiments, editing a target nucleic acid comprise contacting a target nucleic acid with a first guide nucleic acid that binds to a first effector protein and hybridizes to a first region of the target nucleic acid and a second guide nucleic acid that binds to a second effector protein or programmable nickase and hybridizes to a second region of the target nucleic acid. In some embodiments, the first effector protein introduces a first break in a first strand at the first region of the target nucleic acid, and the second effector protein introduces a second break in a second strand at the second region of the target nucleic acid. In some embodiments, a segment of the target nucleic acid between the first break and the second break is removed, thereby the target nucleic acid is edited. In some embodiments, a segment of the target nucleic acid between the first break and the second break is replaced (e.g., with donor nucleic acid), thereby the target nucleic acid is edited.

[0440] In some embodiments, methods, systems and compositions described herein edit a target nucleic acid wherein such editing results in one or more indels. In some embodiments, where compositions, systems, and/or methods described herein effect one or more indels, the impact on the transcription and/or translation of the target nucleic acid is predicted depending on: 1) the amount of indels generated; and 2) the location of the indel on the target nucleic acid. For example, as described herein, in some embodiments, if the amount of indels is not divisible by three, and the indels occur within or along a protein coding region, then the edit or mutation is a frameshift mutation. In some embodiments, if the amount of indels is divisible by three, then a frameshift mutation is not effected, but a splicing disruption mutation and/or sequence skip mutation is effected, such as an exon skip mutation. In some embodiments, if the amount of indels is not evenly divisible by three, then a frameshift mutation is effected.

[0441] In some embodiments, methods, systems and compositions described herein edit a target nucleic acid wherein such editing is measured by indel activity. Indel activity measures the amount of change in a target nucleic acid (e.g., nucleotide deletion(s) and/or insertion(s)) compared to a target nucleic acid that has not been contacted by a polypeptide described in compositions, systems, and methods described herein. For example, in some embodiments, indel activity is detected by next generation sequencing of one or more target loci of a target nucleic acid where indel percentage is calculated as the fraction of sequencing reads containing insertions or deletions relative to an unedited reference sequence. In some embodiments, methods, systems, and compositions comprising polypeptides (e.g., effector proteins, effector partners, fusion proteins, or combination thereof) and guide nucleic acid described herein exhibit about 0.0001% to about 65% or more indel activity upon contact to a target nucleic acid compared to a target nucleic acid non-contacted with compositions, systems, or by methods described herein. For example, in some embodiments, methods, systems, and compositions comprising polypeptides (e.g., effector proteins, effector partners, fusion proteins, or combination thereof) and guide nucleic acid described herein exhibit about 0.0001%, about 0.001%, about 0.01%, about 0.1%, about 1%, about 5%, about 10%, about 15%, about 20%, about 25%, about 30%, about 35%, about 40%, about 45%, about 50%, about 55%, about 60%, about 65% or more indel activity.

[0442] In some embodiments, editing of a target nucleic acid as described herein effects one or more mutations comprising splicing disruption mutations, frameshift mutations (e.g., 1+ or 2+ frameshift mutation), sequence deletion, sequence skipping, sequence reframing, sequence knock-in, or any combination thereof. In some embodiments, the splicing disruption can be an editing that disrupts a splicing of a target nucleic acid or a splicing of a sequence that is transcribed from a target nucleic acid relative to a target nucleic acid without the splicing disruption. In some embodiments, the frameshift mutation can be an editing that alters the reading frame of a target nucleic acid relative to a target nucleic acid without the frameshift mutation. In some embodiments, the frameshift mutation can be a +2 frameshift mutation, wherein a reading frame is edited by 2 bases. In some embodiments, the frameshift mutation can be a +1 frameshift mutation, wherein a reading frame is edited by 1 base. In some embodiments, the frameshift mutation is an editing that alters the number of bases in a target nucleic acid so that it is not divisible by three. In some embodiments, the frameshift mutation can be an editing that is not a splicing disruption. In some embodiments a sequence as described in reference to the nucleotide sequence deletion, sequence skipping, sequence reframing, and sequence knock-in can be a DNA sequence, a RNA sequence, an edited DNA or RNA sequence, a mutated sequence, a wild-type sequence, a coding sequence, a non-coding sequence, an exonic sequence (exon), an intronic sequence (intron), or any combination thereof. In some embodiments, the nucleotide sequence deletion is an editing where one or more sequences in a target nucleic acid are deleted relative to a target nucleic acid without the nucleotide sequence deletion. In some embodiments, the nucleotide sequence deletion can result in or effect a splicing disruption or a frameshift mutation. In some embodiments, the nucleotide sequence deletion result in or effect a splicing disruption. In some embodiments, the nucleotide sequence skipping is an editing where one or more sequences in a target nucleic acid are skipped upon transcription or translation of the target nucleic acid relative to a target nucleic acid without the nucleotide sequence skipping. In some embodiments, the nucleotide sequence skipping can result in or effect a splicing disruption or a frameshift mutation. In some embodiments, the nucleotide sequence skipping can result in or effect a splicing disruption. In some embodiments, the nucleotide sequence reframing is an editing where one or more bases in a target are edited so that the reading frame of the nucleotide sequence is reframed relative to a target nucleic acid without the nucleotide sequence reframing. In some embodiments, the nucleotide sequence reframing can result in or effect a splicing disruption or a frameshift mutation. In some embodiments, the nucleotide sequence reframing can result in or effect a frameshift mutation. In some embodiments, the nucleotide sequence knock-in is an editing where one or more sequences is inserted into a target nucleic acid relative to a target nucleic acid without the nucleotide sequence knock-in. In some embodiments, the nucleotide sequence knock-in can result in or effect a splicing disruption or a frameshift mutation. In some embodiments, the nucleotide sequence knock-in can result in or effect a splicing disruption.

[0443] In some embodiments, editing of a target nucleic acid can be locus specific, wherein compositions, systems, and methods described herein can edit a target nucleic acid at one or more specific loci to effect one or more specific mutations comprising splicing disruption mutations, frameshift mutations, sequence deletion, sequence skipping, sequence reframing, sequence knock-in, or any combination thereof. For example, editing of a specific locus can affect any one of a splicing disruption, frameshift (e.g., 1+ or 2+ frameshift), sequence deletion, sequence skipping, sequence reframing, sequence knock-in, or any combination thereof. In some embodiments, editing of a target nucleic acid can be locus specific, modification specific, or both. In some embodiments, editing of a target nucleic acid can be locus specific, modification specific, or both, wherein compositions, systems, and methods described herein comprise polypeptides (e.g., effector proteins, effector partners, fusion proteins, or combination thereof) described herein and a guide nucleic acid described herein.

[0444] In some embodiments, methods of editing a target nucleic acid or modulating the expression of a target nucleic acid is performed in vivo. In some embodiments, methods of editing a target nucleic acid or modulating the expression of a target nucleic acid is performed in vitro. For example, in some embodiments, a plasmid is edited in vitro using a composition described herein and introduced into a cell or organism. In some embodiments, methods of editing a target nucleic acid or modulating the expression of a target nucleic acid is performed ex vivo. For example, in some embodiments, methods comprise obtaining a cell from a subject, editing a target nucleic acid in the cell with methods described herein, and returning the cell to the subject.

[0445] In some embodiments, methods of modifying described herein comprise contacting a target nucleic acid with one or more components, compositions or systems described herein. In some embodiments, the one or more components, compositions or systems described herein comprise at least one of: a) one or more polypeptides (e.g., effector proteins, effector partners, fusion proteins, or combination thereof), or one or more nucleic acids encoding the one or more polypeptides; and b) one or more guide nucleic acids, or one or more nucleic acids encoding the one or more guide nucleic acids. In some embodiments, the one or more effector proteins introduce a single-stranded break or a double-stranded break in the target nucleic acid. In some embodiments, methods of modifying described herein produce a modified target nucleic acid comprising an engineered nucleic acid sequence that expresses polypeptide having new activity as compared to an unmodified target nucleic acid, or alters expression of an endogenous polypeptide as compared to an unmodified target nucleic acid.

[0446] In some embodiments, methods of modifying described herein comprise using one or more guide nucleic acids or uses thereof, wherein the methods modify a target nucleic acid at a single location. In some embodiments, the methods comprise contacting an RNP comprising polypeptides (e.g., effector proteins, effector partners, fusion proteins, or combination thereof) and a guide nucleic acid to the target nucleic acid. In some embodiments, the methods introduce a mutation (e.g., point mutations, deletions) in the target nucleic acid relative to a corresponding wildtype nucleotide sequence. In some embodiments, the methods remove or correct a disease-causing mutation in a nucleic acid sequence to produce a corresponding wildtype nucleotide sequence. In some embodiments, the methods remove/correct point mutations, deletions, null mutations, or tissue-specific mutations in a target nucleic acid. In some embodiments, the methods introduce a single stranded cleavage, a nick, a deletion of one or two nucleotides, an insertion of one or two nucleotides, a substitution of one or two nucleotides, an epigenetic modification (e.g., methylation, demethylation, acetylation, or deacetylation), or a combination thereof to the target nucleic acid. In some embodiments, the methods comprise using an effector protein and two guide nucleic acids, wherein two RNPs cleave the target nucleic acid at the same location, wherein a first RNP comprises the effector protein and a first guide nucleic acid, and wherein a second RNP comprises the effector protein and a second guide nucleic acid. In some embodiments, methods comprising using two effector protein and two guide nucleic acids, wherein both RNPs cleave the target nucleic acid at the same location, wherein a first RNP comprises a first effector protein and a first target nucleic acid, and wherein a second RNP comprises a second effector protein and a second target nucleic acid.

[0447] In some embodiments, methods of modifying described herein comprise using one or more guide nucleic acids or uses thereof, wherein the methods modify a target nucleic acid at two different locations. In some embodiments, the methods introduce two cleavage sites in the target nucleic acid, wherein a first cleavage site and a second cleavage site comprise one or more nucleotides therebetween. In some embodiments, the methods cause deletion of the one or more nucleotides. In some embodiments, the deletion restores a wild-type reading frame. In some embodiments, the wild-type reading frame produces at least a partially functional protein. In some embodiments, the deletion causes a non-wild-type reading frame. In some embodiments, a non-wild-type reading frame produces a partially functional protein or non-functional protein. In some embodiments, the at least partially functional protein has at least 50%, at least 60%, at least 70%, at least 80%, at least 90%, at least 100%, at least 110%, at least 120%, at least 130%, at least 140%, at least 150%, at least 180%, at least 200%, at least 300%, at least 400% activity compared to a corresponding wildtype protein. In some embodiments, the methods comprise using an effector protein and two guide nucleic acids, wherein two RNPs cleave the target nucleic acid at different locations, wherein a first RNP comprises the effector protein and a first guide nucleic acid, and wherein a second RNP comprises the effector protein and a second guide nucleic acid. In some embodiments, methods comprising using two effector protein and two guide nucleic acids, wherein both RNPs cleave the target nucleic acid at the same location, wherein a first RNP comprises a first effector protein and a first target nucleic acid, and wherein a second RNP comprises a second effector protein and a second target nucleic acid.

[0448] In some embodiments, methods of editing described herein comprise inserting a donor nucleic acid into a cleaved target nucleic acid. In some embodiments, the cleaved target nucleic acid formed by introducing a single-stranded break into a target nucleic acid. In some embodiments, the donor nucleic acid is inserted at a specified (e.g., effector protein targeted) point within the target nucleic acid. In some embodiments, the cleaved target nucleic acid is cleaved at a single location. In such embodiments, the methods comprise contacting a target nucleic acid with an effector protein described herein, thereby introducing a single-stranded break in the target nucleic acid; and contacting the target nucleic acid with a donor nucleic acid for homologous recombination, optionally by HDR or NHEJ, thereby introducing a new sequence into the target nucleic acid (e.g., at a cleavage site). In some embodiments, the cleaved target nucleic acid is cleaved at two locations. In such embodiments, the methods comprise contacting a target nucleic acid with an effector protein described herein, thereby introducing a single-stranded break in the target nucleic acid; contacting the target nucleic acid with a second effector protein described herein, to generate a second cleavage site in the target nucleic acid, ligating the regions flanking the first and second cleavage site, optionally through NHEJ or single-strand annealing, thereby resulting in the excision of a portion of the target nucleic acid between the first and second cleavage sites from the target nucleic acid; and contacting the target nucleic acid with a donor nucleic acid for homologous recombination, optionally by HDR or NHEJ, thereby introducing a new sequence into the target nucleic acid (e.g., in between two cleavage sites).

[0449] In some embodiments, methods of modifying described herein comprise methods of increasing, reducing, or eliminating the expression of a target nucleic acid (e.g., an aberrant gene) as set forth in TABLE 10 by at least 10%, at least 20%, at least 30%, at least 40%, at least 50%, at least 60%, at least 70%, at least 80%, at least 90%, at least 95% or more relative to expression of a WT gene. For example, in some embodiments, compositions, systems and methods reduce expression of an aberrant HBB gene by at least 10%, at least 20%, at least 30%, at least 40%, at least 50%, at least 60%, at least 70%, at least 80%, at least 90%, at least 95% or more relative to expression of a WT HBB gene. In some embodiments, methods of modifying described herein comprise methods of modulating expression of an aberrant HBB gene by at least 10%, at least 20%, at least 30%, at least 40%, at least 50%, at least 60%, at least 70%, at least 80%, at least 90%, at least 95% or more relative to expression of a WT HBB gene.

### Method of Manufacturing an Engineered HSC

[0450] Provided herein are compositions, methods, and systems for modifying (e.g., editing) target nucleic acids comprised in HSCs. HSCs comprising modified target nucleic acids may comprise epigenetic and/or sequence modifications as compared to a WT HSC. In some embodiments, compositions, methods, and systems for modifying (e.g., editing) target nucleic acids comprised in HSCs yield to the manufacturing of engineered HSCs. In some embodiments, a method of manufacturing an engineered HSC comprising: (i) contacting a HSC with any one of the systems described herein, any one of the vectors described herein, or any one of the pharmaceutical compositions described herein for a first sufficient period of time to allow for transfection of the HSC; and (ii) culturing the HSC for a second sufficient period of time for indels to occur in the target nucleic acid for modifying target nucleic acid and, thereby, producing the engineered HSC. In some embodiments, the transfection comprises electroporation, viral infection, transfection, lipofection, electroporation, calcium phosphate precipitation, direct microinjection, or combinations thereof. In some embodiments, the method is performed in vitro or in vivo. In some embodiments, the target nucleic acid comprises any one of the target nucleic acid sequences listed in TABLE 10, a fragment thereof, a variant thereof, a promoter thereof, an enhancer thereof, or a combination thereof. In some embodiments, the modifying comprises cleaving the target nucleic acid, deleting a nucleic acid of the target nucleic acid, inserting a donor nucleic acid into the target nucleic acid, substituting a nucleic acid of the target nucleic acid with a donor nucleic acid, more than one of the foregoing, or combinations thereof. In some embodiments, the modifying results in upregulation of gene expression, downregulation of gene expression, expression of one or more proteins, or a combination thereof. In some embodiments, the first sufficient time comprises at least about 1 hour, at least about 2 hours, at least about 3 hours, at least about 4 hours, at least about 5 hours or at least about 6 hours. In some embodiments, the second sufficient time at least 1 day, at least 2 days, at least 3 days, at least 4 days, at least 5 days, or at least 6 days. In some embodiments, the method further comprises freezing the HSC. In some embodiments, the method comprises no other agent that alters ability of the engineered HSC to self-renew and/or differentiate into different types of cells.

### Genetically Modified Cells and Organisms

[0451] In some embodiments, methods of editing described herein is employed to generate a genetically modified cell. In some embodiments, the cell is a eukaryotic cell (e.g., a mammalian cell) or a prokaryotic cell (e.g., an archaeal cell). In some embodiments, the cell is derived from a multicellular organism and cultured as a unicellular entity. In some embodiments, the cell comprises a heritable genetic modification, such that progeny cells derived therefrom comprise the heritable genetic mutation. In some embodiments, the cell is progeny of a genetically modified cell comprising a genetic modification of the genetically modified parent cell. In some embodiments, the genetically modified cell comprises a deletion, insertion, mutation, or non-native sequence relative to a wild-type version of the cell or the organism from which the cell was derived.

[0452] In some embodiments, methods of editing described herein is performed in a cell. In some embodiments, the cell is in vivo. In some embodiments, the cell is ex vivo. In some embodiments, the cell is an isolated cell. In some embodiments, the cell is inside of an organism. In some embodiments, the cell is an organism. In some embodiments, the cell is in a cell culture. In some embodiments, the cell is one of a collection of cells. In some embodiments, the cell is a mammalian cell or derived there from. In some embodiments, the cell is a rodent cell or derived there from. In some embodiments, the cell is a human cell or derived there from. In some embodiments, the cell is a eukaryotic cell or derived there from. In some embodiments, the cell is a progenitor cell or derived there from. In some embodiments, the cell is a pluripotent stem cell or derived there from. In some embodiments, the cell is an animal cell or derived there from. In some embodiments, the cell is an invertebrate cell or derived there from. In some embodiments, the cell is a vertebrate cell or derived there from. In some embodiments, the cell is from a specific organ or tissue. In some embodiments, the cell is a hepatocyte. In some embodiments, the tissue is a subject's blood, bone marrow, or cord blood. In some embodiments, the tissue is a heterologous donor blood, cord blood, or bone marrow. In some embodiments, the tissue is an allogenic blood, cord blood, or bone marrow. In some embodiments, the tissue comprises a muscle. In some embodiments, the muscle comprises a skeletal muscle.

[0453] Described herein are methods of correcting a mutation that resulted in sickle cell disease (SCD). In some embodiments, the methods comprise: (a) contacting a target nucleic acid of the HSC with the systems or compositions described herein for a first sufficient period of time to allow for transfection of the HSC; and (b) culturing the HSC for a second sufficient period of time for indels to occur in the target nucleic acid for modifying target nucleic acid. In some embodiments, the method results in one or more of inducing homology directed repair (HDR) for the correction of a single mutation, conversing a base of a single mutation, and correcting common clustered mutations for β-thalassemia.

[0454] Described herein are methods of substituting a target sequence of β-globin encoding gene in a HSC. In some embodiments, the methods comprise: (a) contacting a target nucleic acid of the HSC with the systems or compositions described herein for a first sufficient period of time to allow for transfection of the HSC; and (b) culturing the HSC for a second sufficient period of time for indels to occur in the target nucleic acid for modifying target nucleic acid.

[0455] Described herein are methods of downregulating BCL11A in a HSC. In some embodiments, the methods comprise: (a) contacting a target nucleic acid of the HSC with the systems or compositions described herein for a first sufficient period of time to allow for transfection of the HSC; and (b) culturing the HSC for a second sufficient period of time for indels to occur in the target nucleic acid for modifying target nucleic acid. In some embodiments, the method results in one or more of inducing homology directed repair (HDR) for the correction of a single mutation, conversing a base of a single mutation, and correcting common clustered mutations for β-thalassemia. In some embodiments, the methods disrupt BCL11A gene by disrupting (e.g., cleaving) the binding motif of one or more transcriptional factors. In some embodiments, the methods disrupt the binding motif of the transcription inhibitor of γ-globin gene. In some embodiments, the methods convert the HBG1/2 promoters to create a novel transcriptional activator. In some embodiments, the methods disrupt BCL11A gene by disrupting (e.g., cleaving) the binding motif of one or more transcriptional factors, and wherein the method further upregulates γ-globin in the HSC. In some embodiments, the binding motif is GATA1.

[0456] In some embodiments, methods of editing described herein comprise contacting cells with compositions or systems described herein. In some embodiments, the contacting comprises electroporation, acoustic poration, optoporation, viral vector-based delivery, iTOP, nanoparticle delivery (e.g., lipid or gold nanoparticle delivery), cell-penetrating peptide (CPP) delivery, DNA nanostructure delivery, or any combination thereof.

[0457] In some embodiments, methods of editing described herein are performed in a subject. In some embodiments, the methods comprise administering compositions described herein to the subject. In some embodiments, the subject is a human. In some embodiments, the subject is a mammal (e.g., rat, mouse, cow, dog, pig, sheep, horse). In some embodiments, the subject is a vertebrate or an invertebrate. In some embodiments, the subject is a laboratory animal. In some embodiments, the subject is a patient. In some embodiments, the subject is at risk of developing, suffering from, or displaying symptoms of a disease. In some embodiments, the subject has a mutation associated with a gene described herein. In some embodiments, the subject displays symptoms associated with a mutation of a gene described herein.

[0458] In some embodiments, compositions, systems and methods described herein are employed to generate a genetically modified cell. In some embodiments, the cell is a eukaryotic cell (e.g., a mammalian cell) or a prokaryotic cell (e.g., an archaeal cell). In some embodiments, the cell is a stem cell that self-renews and/or differentiates into different types of cells. In some embodiments, the cell is an allogeneic stem cell. In some embodiments, the cell is a hematopoietic stem cell (HSC). In some embodiments the HSC is derived from induced pluripotent stem cell (iPSC) (e.g., in vitro).

[0459] In some embodiments, a HSC is an allogeneic stem cell transplanted from stem cells harvested from any one of three general donor sources: (i) peripheral blood stem cells, as collected from a donor's bloodstream through a process called apheresis; (ii) bone marrow stem cells, as collected from a donor's bone marrow through a procedure called bone marrow harvesting; (ii) umbilical cord blood stem cells as collected from blood from the umbilical cord and placenta during birth.

[0460] In some embodiments, a HSC is a pluripotent stem cell. In some embodiments, a HSC is a population of hematopoietic stem and pluripotent cells. In some embodiments, a HSC self-renews and/or differentiates into different types of cells. In some embodiments, a HSC differentiates into any one of: B cell, T cell, NK cell, macrophage, microglia, neutrophils, lymphoid cell, blood cell, myeloid cell, lymphoid cell, hemopoietic stem or progenitor cell, myeloid common progenitor cell, megakaryocytes-erythrocyte progenitor cell, granulocytes-macrophages progenitor cell, monocytic-dendritic progenitor cell, a lymphoid common progenitor cell, an autoimmune cell, a red blood cell.

[0461] In some embodiments, a HSC comprising a genetic modification (e.g., engineered HSCs, modified HSCs) differentiates into any one of the cells described herein such that the resultant differentiated cells comprise the genetic modification. In some embodiments, the differentiated cells are used in the treatment of a disease or disorder. In some embodiments, engineered HSCs differentiate into myeloid common progenitor cells involved in the production of blood cells such as platelets, red blood cells (RBCs), and white blood cells. In some embodiments, the RBCs described herein comprise the same genetic modification comprised in the engineered HSCs. In some embodiments, the RBCs described herein for use in the treatment of a genetic blood disease or disorder.

[0462] Similarly, engineered HSCs differentiate into lymphocytes (e.g., B cells, T cells). In some embodiments, the B cells and/or T cells described herein for use in the treatment of leukemia.

[0463] In some embodiments, the engineered HSCs described herein for use in the treatment of any one of diseases or disorders listed in TABLE 12. In some embodiments, the engineered HSCs described herein for use in the treatment of a genetic blood disease or disorder. In some embodiments, the engineered HSCs described herein for use in the treatment of sickle cell anemia, sickle cell disease (SCD), and/or β-thalassemia.

[0464] In some embodiments, HSCs described herein or a population of HSCs described herein can naturally cross the blood-brain barrier and evenly distribute upon crossing. In some embodiments, engineered HSCs cross the blood-brain barrier and may differentiate into a cell involved in the treatment of a genetic blood disease or an autoimmune disease. In some embodiments, HSCs described herein for the use of reducing autoimmune activity in brain.

[0465] In some embodiments, HSCs are engineered with any one of the systems described herein. In some embodiments, HSCs are engineered with a system comprising a Cas protein fused to methyl transferase, wherein the methyl transferase permanently silences the transcription of a target nucleic acid. In some embodiments, the permanent silencing of the transcription of a target nucleic acid for the treatment of a disease or disorder described herein, such as sickle cell anemia. In some embodiments, pharmaceutical compositions comprise HSCs as described herein, and a pharmaceutically acceptable carrier. In some embodiments, HSCs undergo extended freezing prior to thawing. In some embodiments, the HSCs undergo in vivo engineering after thawing. In some embodiments any one of the methods described herein involve extended freezing and/or thawing.

### XIV. Methods of Treating a Disease or Disorder

[0466] Described herein are methods for treating a disease in a subject by contacting a target nucleic acid with a composition or system described herein, wherein the target nucleic acid is associated with a gene or expression of a gene related to the disease. In some embodiments, methods comprise treating, preventing, or inhibiting a disease or disorder associated with a mutation or aberrant expression of a gene. In some embodiments, methods for treating a disease or disorder comprise methods of editing a nucleic acid described herein.

[0467] In some embodiments, methods comprise administration of a composition(s) or component(s) of a system described herein. In some embodiments, the composition(s) or component(s) of the system comprises use of a recombinant nucleic acid (DNA or RNA), administered for the purpose to edit a nucleic acid. In some embodiments, the composition or component of the system comprises use of a vector to introduce a functional gene or transgene. In some embodiments, vectors comprise nonviral vectors, including cationic polymers, cationic lipids, or bio-responsive polymers. In some embodiments, the bio-responsive polymer exploits chemical-physical properties of the endosomal environment (e.g., pH) to preferentially release the genetic material in the intracellular space. In some embodiments, vectors comprise viral vectors, including retroviruses, adenoviruses, adeno-associated viruses, and herpes simplex viruses. In some embodiments, the vector comprises a replication-defective viral vector, comprising an insertion of a therapeutic gene inserted in genes essential to the lytic cycle, preventing the virus from replicating and exerting cytotoxic effects. By way of non-limiting example, in some embodiments, the composition(s) comprises pharmaceutical compositions described herein. Methods of gene therapy that are applicable to the compositions and systems described herein are described in more detail in Ingusci et al., “Gene Therapy Tools for Brain Diseases”, Front. Pharmacol. 10:724 (2019), which is hereby incorporated by reference in its entirety.

[0468] In some embodiments, treating, preventing, or inhibiting disease or disorder in a subject comprises contacting a target nucleic acid associated with a particular ailment with a composition described herein. In some embodiments, the methods of treating, preventing, or inhibiting a disease or disorder involves removing, editing, modifying, replacing, transposing, or affecting the regulation of a genomic sequence of a patient in need thereof. In some embodiments, the methods of treating, preventing, or inhibiting a disease or disorder involves modulating gene expression.

[0469] In some embodiments, the compositions and systems described herein are for use in therapy. In some embodiments, the compositions and systems described herein are for use in treating a disease or condition described herein. Also provided is the use of the compositions described herein in the manufacture of a medicament. Also provided is the use of the compositions described herein in the manufacture of a medicament for therapeutic and/or prophylactic treatment of a disease or condition described herein.

[0470] In some embodiments, the polypeptides (e.g., effector proteins, effector partners, fusion proteins, or combination thereof) described herein are for use in therapy. In some embodiments, the polypeptides described herein are for use in treating a disease or condition described herein. Also provided is the use of the polypeptides described herein in the manufacture of a medicament. Also provided is the use of the polypeptides described herein in the manufacture of a medicament for therapeutic and/or prophylactic treatment of a disease or condition described herein.

[0471] In some embodiments, the guide nucleic acids described herein are for use in therapy. In some embodiments, the guide nucleic acids described herein are for use in treating a disease or condition described herein. Also provided is the use of the guide nucleic acids described herein in the manufacture of a medicament. Also provided is the use of the guide nucleic acids described herein in the manufacture of a medicament for therapeutic and/or prophylactic treatment of a disease or condition described herein.

[0472] Described herein are compositions, systems and methods for treating a disease in a subject by editing a target nucleic acid associated with a gene or expression of a gene related to the disease. For example, in some embodiments, the editing comprises knock-out of a gene comprising the target nucleic acid. In some embodiments, the compositions, systems and methods comprise LNPs, wherein the LNPs comprise the effector proteins described herein or nucleic acids encoding the effector proteins, the effector partners described herein or nucleic acids encoding the effector partners, the fusion proteins described herein or nucleic acids encoding the fusion proteins, or combinations thereof. In some embodiments, the LNPs comprise chemically modified guide nucleic acids. In some embodiments, the LNPs described herein are used for delivering the compositions, or one or more components of the systems described herein to a specific organ (e.g., liver). Alternatively, in some embodiments, the compositions, systems and methods comprise AAV particles, wherein the AAV particles comprise nucleic acids encoding the effector proteins described herein, the effector partners described herein, the fusion proteins described herein, or combinations thereof. In some embodiments, the AAV particles comprise nucleic acids encoding guide nucleic acids described herein. In some embodiments, the AAV particles described herein are used for delivering the compositions, or one or more components of the systems described herein to a specific cells (e.g., nerve cells or muscle cells). In some embodiments, methods comprise administering a composition or cell described herein to a subject. By way of non-limiting example, in some embodiments, the disease comprises a cancer, an ophthalmological disorder, a neurological disorder, a neurodegenerative disease, a blood disorder, or a metabolic disorder, or a combination thereof. In some embodiments, the disease comprises an inherited disorder, also referred to as a genetic disorder. In some embodiments, the disease is the result of an infection or associated with an infection. Also, by way of non-limiting example, the compositions are pharmaceutical compositions described herein.

[0473] In some embodiments, the compositions and methods described herein are used for treating, preventing, or inhibiting a disease or syndrome in a subject. In some embodiments, treating, preventing, or inhibiting a disease or syndrome comprises modifying or editing a target nucleic acid, inserting a donor nucleic acid, or a combination thereof. In some embodiments the compositions and methods described herein are used for treating, preventing, or inhibiting a disease or syndrome listed in, but not limited to, TABLE 12.

[0474] In some embodiments, treating, preventing, or inhibiting a disease or syndrome comprises modifying or editing a target nucleic acid, wherein the target nucleic acid comprises any one of the genes recited in TABLE 11, a fragment thereof, a promoter thereof, an enhancer thereof, or a combination thereof. In some embodiments, the target nuclei acid comprises any one of the following genes: BCL11A, B2M, PNPLA2, CHD4, CIITA, GATA1, HBA, HBA1, HBA2, β-globin gene (HBB gene), HBD, HBE, HBE1, HBG, γ-globin 1 gene (HBG1 gene), γ-globin 2 gene (HBG2 gene), HBM, HBQ1, HBZ, HOXA9, KLF1, MBD3, MYB, TRAC1, ZBTB7A, a fragment thereof, a promoter thereof, an enhancer thereof, or a combination thereof. In some embodiments, the target nucleic acids described herein comprise a ε-globin gene, γ-globin gene (HBG gene), G γ-globin gene (HBG2 gene), A γ-globin gene (HBG1 gene), δ-globin gene, β-globin gene (HBB gene), a fragment thereof, a promoter thereof, an enhancer thereof, or a combination thereof. In some embodiments, the disease comprises sickle cell anemia or β-thalassemia and the target nucleic acid is the Beta globin gene (HBB). In some embodiments, the disease comprises acute myeloid leukemia and the target nucleic acid is the CHD4 gene). In some embodiments, the disease is related to immature blood cells and the target nucleic acid is the GATA1 gene. In some embodiments, the disease is related to fetal hemoglobin (HbF) and the target nucleic acid is the HBG1 and/or HBG2 gene. In some embodiments, the disease is alpha-thalassemia and/or T-Cell adult acute lymphocytic leukemia and the target nucleic acid is the HBZ gene. In some embodiments, the disease is related to early embryo development and the target nucleic acid is the HBE1 gene and/or HBZ gene. In some embodiments, the disease is alpha-thalassemia and/or thalassemia and the target nucleic acid is the HBM gene. In some embodiments, the disease is hemoglobin E disease and/or thalassemia and the target nucleic acid is the HBQ1 gene. In some embodiments, the disease is acute myeloid leukaemia (AML) and the target nucleic acid is the HOXA9 gene. In some embodiments, the disease is related to expression of adult beta-globin and other erythroid (red blood) genes and the target nucleic acid is the KLF1 gene. In some embodiments, the disease is leukemia and the target nucleic acid is the MBD3 gene. In some embodiments, the disease is leukemia, lymphoma, angiocentric glioma and/or acute basophilic leukemia and the target nucleic acid is the MYB gene. In some embodiments, the disease is immunodeficiency and/or T-Cell Receptor-Alpha/Beta deficiency and the target nucleic acid is the TRAC gene. In some embodiments, the disease is related to cell differentiation and proliferation, leukemia and/or persistent fetal hemoglobin and the target nucleic acid is the ZBTB7A gene.

[0475] In some embodiments, the target nucleic acid comprises a portion of a gene comprising a mutation associated with disease, a mutated gene whose expression is associated with disease, or both wherein the gene is selected from BCL11A, MYB, HOXA9, HBB, HBG1, HBG2, CHD4, KLF1, MBD3, ZBTB7A, TRAC and GATA1. In some embodiments, the target nucleic acid comprises a portion of the gene wherein the compositions, systems, and methods described herein may be used to selectively downregulate or upregulate expression of the gene. In some embodiments, the gene is HBB. In some embodiments, the target nucleic acid is a mutant allele of the gene. In some embodiments, the target nucleic acid is a wildtype allele of the gene. In some embodiments, the target nucleic acid comprises a portion of a HBB gene wherein the compositions, systems, and methods described herein are useful for treating a blood disease and/or genetic disease. In some embodiments, the disease is sickle cell disease, sickle cell anemia, and/or β-thalassemia.

[0476] In some embodiments, the methods for treating, preventing, or inhibiting a disease or syndrome described herein further comprise an antibody conjugated to one or more components of any one of the systems described herein. In some embodiments, the antibody recognizes and binds to HSCs. In some embodiments, the antibody recognizes and binds to CD34+ and/or CD117. In some embodiments, the methods described herein comprise harvesting cells from a patient, wherein the cells are harvested from the blood and/or from the bone marrow. In some embodiments, the harvesting comprises harvesting cells comprising CD34+. In some embodiments, the methods described herein further comprise CD117 antibody conjugated to the RNP or LNP/RNP to deliver cargo into HSC. In some embodiments, the methods described herein are performed in vivo.

[0477] In some embodiments, the method further comprises modifying the cells (e.g., HSCs), freezing the cells, thawing the cells, or combinations thereof. In some embodiments, the method of treating a disease or disorder further comprises transplanting the cells into a patient (e.g., bone marrow transplant). In some embodiments, modifying the cells comprises the use of any one of the AAV vectors described herein as described herein. In some embodiments, modifying the cells comprises the use of multiple AAV vectors described herein. In some embodiments, modifying the cells comprises the use of a single vector comprising a protein and more than one guide wherein each of the guide targets a different target nucleic acid (e.g., HBB gene, BCL11A gene, HBG1 gene, HBG2 gene). In some embodiments, transplanting the cells into a patient comprises any one of the relevant methods (e.g., injection) described herein.

[0478] In some embodiments, the methods for treating, preventing, or inhibiting a disease or syndrome described herein comprises administering a cell modified by a system in a subject in need thereof, wherein the cell comprises a hematopoietic stem cell (HSC), a population of hematopoietic stem and progenitor cells (HSPCs), a blood cell, a myeloid cell, a lymphoid cell, a myeloid common progenitor cell, a megakaryocytes-erythrocyte progenitor cell, a granulocytes-macrophages progenitor cell, a monocytic-dendritic progenitor cell, or a lymphoid common progenitor cell. In some embodiments, the system comprises: (a) an engineered guide nucleic acid, or a nucleic acid encoding the engineered guide nucleic acid, wherein: (i) the engineered guide nucleic acid comprises a first region and a second region, (ii) the second region comprises a nucleotide sequence that is at least 80% identical to any one of repeat sequences recited in TABLE 5 or intermediary sequences recited in TABLE 8, (iii) the second region comprises a nucleotide sequence that is at least 80% identical to any one of spacer sequences recited in TABLE 7, and (iv) the first region and the second region are heterologous to each other, and (b) a polypeptide, or a nucleic acid encoding the polypeptide, wherein (i) the polypeptide at least partially binds to the first region to form an RNP complex, and (ii) the RNP complex, upon hybridization of the second region to the target nucleic, modifies the target nucleic acid of the cell.

[0479] In some embodiments, the methods for treating, preventing, or inhibiting a disease or syndrome described herein comprises modifying a cell in vivo by contacting the cell with a system in a subject in need thereof, wherein the cell comprises a hematopoietic stem cell (HSC), a population of hematopoietic stem and progenitor cells (HSPCs), a blood cell, a myeloid cell, a lymphoid cell, a myeloid common progenitor cell, a megakaryocytes-erythrocyte progenitor cell, a granulocytes-macrophages progenitor cell, a monocytic-dendritic progenitor cell, or a lymphoid common progenitor cell. In some embodiments, the system comprises: (a) an engineered guide nucleic acid, or a nucleic acid encoding the engineered guide nucleic acid, wherein: (i) the engineered guide nucleic acid comprises a first region and a second region, (ii) the second region comprises a nucleotide sequence that is at least 80% identical to any one of repeat sequences recited in TABLE 5 or intermediary sequences recited in TABLE 8, (iii) the second region comprises a nucleotide sequence that is at least 80% identical to any one of spacer sequences recited in TABLE 7, and (iv) the first region and the second region are heterologous to each other, and (b) a polypeptide, or a nucleic acid encoding the polypeptide, wherein (i) the polypeptide at least partially binds to the first region to form an RNP complex, and (ii) the RNP complex, upon hybridization of the second region to the target nucleic, modifies the target nucleic acid of the cell.

[0480] In some embodiments, the method of treating one of the diseases or disorders listed in TABLE 12 with the engineered HSC described herein.

### XV. Illustrative Embodiments

[0481] Embodiment 1. A system for modifying a target nucleic acid of a hematopoietic stem cell (HSC), the system comprising:
[0482] (i) a polypeptide, or a nucleic acid encoding the polypeptide, wherein the polypeptide comprises an amino acid sequence that is at least 85% identical to any one of the amino acid sequences set forth in TABLE 1; and
[0483] (ii) an engineered guide nucleic acid, or a nucleic acid encoding the engineered guide nucleic acid, wherein; and
   [0484] a) the engineered guide nucleic acid comprises a first region and a second region, b) the polypeptide at least partially binds to the first region to form an RNP complex,
   [0485] c) the second region comprises a nucleotide sequence that is complementary or the reverse complement of a target sequence of the target nucleic acid,
   [0486] d) the RNP complex, upon hybridization of the second region to the target nucleic, modifies the target nucleic acid of the HSC,
   [0487] e) the first region and the second region are heterologous to each other, and
   [0488] f) the HSC following modification by the RNP complex retains at least one of cell viability, cell proliferation, and multi-lineage development potential relative to an unmodified HSC.

[0489] Embodiment 2. The system of Embodiment 1, wherein the target nucleic acid is within a gene of the HSC.

[0490] Embodiment 3. The system of claim 1 or 2, wherein the target nucleic acid comprises a nucleotide sequence comprising any one of genes set forth in TABLE 10, a variant thereof or a portion thereof.

[0491] Embodiment 4. The system of any one of Embodiments 1-3, wherein the target nucleic acid comprises a nucleotide sequence that is at least 85% identical to any one of the nucleotide sequences set forth in TABLE 11.

[0492] Embodiment 5. The system of any one of Embodiments 1-4, wherein the target nucleic acid comprises any one of the following genes: BCL11A, PNPLA2, CHD4, CIITA, GATA1, HBA, HBA1, HBA2, β-globin gene (HBB gene), 8-globin gene, ¿-globin gene, HBD, HBE, HBE1, γ-globin (HBG gene), HBM, HBQ1, HBZ, HOXA9, KLF1, MBD3, MYB, TRAC1, ZBTB7A, a fragment thereof, a promoter thereof, an enhancer thereof, or a combination thereof.

[0493] Embodiment 6. The system of any one of Embodiments 5, wherein the HBG gene comprises γ-globin 1 gene (HBG1 gene), γ-globin 2 gene (HBG2 gene), G γ-globin gene, A γ-globin gene, a fragment thereof, a promoter thereof, an enhancer thereof, or a combination thereof.

[0494] Embodiment 7. The system of any one of Embodiments 1-6, wherein the target nucleic acid comprises a HBB gene, a fragment thereof, an enhancer thereof or a promoter thereof.

[0495] Embodiment 8. The system of Embodiment 7, wherein the HBB gene comprises a EV6 mutation.

[0496] Embodiment 9. The system of any one of Embodiments 1-8, wherein the target nucleic acid is associated with any one of diseases or disorders set forth in TABLE 12.

[0497] Embodiment 10. The system of any one of Embodiments 1-9, wherein the target nucleic acid is associated with a genetic blood disease or disorder.

[0498] Embodiment 11. The system of any one of Embodiments 1-10, wherein the target nucleic acid is associated with sickle cell anemia, sickle cell disease (SCD), and/or β-thalassemia.

[0499] Embodiment 12. The system of Embodiment 1-11, wherein the target nucleic acid comprises a single nuclear polymorphism (SNP).

[0500] Embodiment 13. The system of any one of Embodiments 1-12, wherein the polypeptide comprises an amino acid sequence that is at least 90% identical, at least 95% identical, or at least 100% identical to any one of the amino acid sequences set forth in TABLE 1.

[0501] Embodiment 14. The system of any one of Embodiments 1-12, wherein the polypeptide comprises a Type V Cas effector protein.

[0502] Embodiment 15. The system of any one of Embodiments 1-12, wherein the polypeptide comprises a Cas.265466, a CasPhi. 12, or a variant thereof.

[0503] Embodiment 16. The system of any one of Embodiments 1-15, wherein the polypeptide comprises binding activity, nuclease activity, nickase activity, base editing activity, cleavage activity, or a combination thereof.

[0504] Embodiment 17. The system of any one of Embodiments 1-16, wherein the polypeptide cleaves within or near the target sequence.

[0505] Embodiment 18. The system of any one of Embodiments 1-17, wherein the polypeptide cleaves at least one strand of the target nucleic acid.

[0506] Embodiment 19. The system of any one of Embodiments 1-18, wherein the polypeptide comprises at least one mutation or amino acid alteration that results in retaining, enhancing or reducing activity relative to corresponding reference amino acid sequence set forth in TABLE 1.

[0507] Embodiment 20. The system of Embodiment 19, wherein the at least one mutation comprises an amino acid substitution at a position as set forth in TABLE 2 relative to corresponding reference amino acid sequence of TABLE 1.

[0508] Embodiment 21. The system of Embodiment any one of Embodiments 1-20, wherein the polypeptide has nickase activity or nuclease activity.

[0509] Embodiment 22. The system of any one of Embodiments 1-21, wherein the polypeptide comprises an effector protein, an effector partner, a fusion protein or a combination thereof.

[0510] Embodiment 23. The system of Embodiment 22, wherein the effector partner is selected from a polymerase, a deaminase, a reverse transcriptase, a transcriptional repressor, an integrase, a recombinase and a transcriptional activator.

[0511] Embodiment 24. The system of Embodiment 23, wherein the effector protein is fused to an effector partner, wherein the effector protein and the effector partner are heterologous to each other.

[0512] Embodiment 25. The system of Embodiment 23 or 24, wherein the effector protein is directly fused to N terminus or C terminus of the effector partner by an amide bond.

[0513] Embodiment 26. The system of any one of Embodiments 1-25, wherein the polypeptide comprises at least one nuclear localization signal sequence.

[0514] Embodiment 27. The system of Embodiment 26, wherein the at least one nuclear localization signal sequence independently comprises an amino acid sequence that is identical to any one of nucleotide sequences set forth in TABLE 3.

[0515] Embodiment 28. The system of any one of Embodiments 1-27, wherein the polypeptide recognizes a protospacer adjacent motif (PAM).

[0516] Embodiment 29. The system of Embodiment 28, wherein the polypeptide recognizes a PAM as set forth in TABLE 4.

[0517] Embodiment 30. The system of any one of Embodiments 1-29, wherein the polypeptide comprises an amino acid sequence that is at least 90% identical to any one of SEQ ID NO: 1, 569-631.

[0518] Embodiment 31. The system of any one of Embodiments 1-30, wherein the polypeptide comprises an amino acid sequence that is at least 90% identical to SEQ ID NO: 1.

[0519] Embodiment 32. The system of Embodiment 31, wherein the polypeptide comprises an amino acid substitution at position D220R, wherein the polypeptide comprises enhanced nuclease activity.

[0520] Embodiment 33. The system of any one of Embodiments 1-32, wherein the engineered guide nucleic acid comprises a sgRNA or a crRNA.

[0521] Embodiment 34. The system of any one of Embodiments 1-29, wherein the polypeptide comprises an amino acid sequence that is at least 90% identical to any one of SEQ ID NO: 2, 632-700.

[0522] Embodiment 35. The system of any one of Embodiments 1-29 and 33, wherein the polypeptide comprises an amino acid sequence that is at least 90% identical to SEQ ID NO: 2.

[0523] Embodiment 36. The system of Embodiment 34, wherein the polypeptide comprises an amino acid substitution at position L26R, wherein the polypeptide comprises enhanced nuclease activity.

[0524] Embodiment 37. The system of any one of Embodiments 1-29 and 34-36, wherein the engineered guide nucleic acid comprises a crRNA.

[0525] Embodiment 38. The system of any one of Embodiments 1-37, wherein the first region comprises a repeat sequence that at least partially binds to the polypeptide.

[0526] Embodiment 39. The system of Embodiment 38, wherein the repeat sequence comprises a nucleotide sequence that is at least 85% identical, at least 90% identical, at least 95% identical, or at least 100% identical to any one of the nucleotide sequences set forth in TABLE 5.

[0527] Embodiment 40. The system of any one of Embodiments 1-33, wherein the first region comprises a handle sequence that is at least partially bound by the polypeptide.

[0528] Embodiment 41. The system of Embodiment 40, wherein the handle sequence comprises a repeat sequence, an intermediary sequence, a linker, or combinations thereof.

[0529] Embodiment 42. The system of any one of Embodiments 1-41, wherein the second region comprises at least 10 contiguous nucleotides that are complementary to a eukaryotic sequence.

[0530] Embodiment 43. The system of any one of Embodiments 1-41, wherein the second region comprises at least 10 contiguous nucleotides that are the reverse complement of the target sequence.

[0531] Embodiment 44. The system of any one of Embodiments 1-43, wherein the second region comprises a spacer sequence that hybridizes to a target sequence of a target nucleic acid, and wherein optionally the spacer sequence comprises any one of the spacer sequences set forth in TABLE 7.

[0532] Embodiment 45. The system of any one of Embodiments 1-44, wherein the engineered guide nucleic acid comprises one or more phosphorothioate (PS) backbone modifications, 2′-fluoro (2′-F) sugar modifications, or 2′-O-Methyl (2′OMe) sugar modifications.

[0533] Embodiment 46. The system of any one of Embodiments 1-29, wherein the engineered guide nucleic acid comprises a nucleotide sequence that is at least 85% identical to any one of the nucleotide sequences set forth in TABLE 9.

[0534] Embodiment 47. The system of any one of Embodiments 1-46, wherein the system comprises at least two engineered guide nucleic acids selected from:
[0535] (i) an engineered guide nucleic acid comprising a spacer sequence that is at least 90% identical or complementary to an equal length portion of a target sequence of a gene encoding the HBB gene, a promoter thereof, an enhancer thereof, or a fragment thereof;
[0536] (ii) an engineered guide nucleic acid comprising a spacer sequence that is at least 90% identical or complementary to an equal length portion of a target sequence of a gene encoding the BCL11A gene, a promoter thereof, an enhancer thereof, or a fragment thereof;
[0537] (iii) an engineered guide nucleic acid comprising a spacer sequence that is at least 90% identical or complementary to an equal length portion of a target sequence of a gene encoding the HBG1 gene, a promoter thereof, an enhancer thereof, or a fragment thereof; and
[0538] (iv) an engineered guide nucleic acid comprising a spacer sequence that is at least 90% identical or complementary to an equal length portion of a target sequence of a gene encoding the HBG2 gene, a promoter thereof, an enhancer thereof, or a fragment thereof.

[0539] Embodiment 48. The system of any one of Embodiments 1-47, wherein the nucleic acid encoding the polypeptide, the nucleic acid encoding the engineered guide nucleic acid, or both are mRNA.

[0540] Embodiment 49. The system of any one of Embodiments 1-48, further comprising a donor nucleic acid, or a nucleic acid encoding a donor nucleic acid.

[0541] Embodiment 50. The system of Embodiment 49, wherein the donor nucleic acid comprises a nucleotide, a nucleotide sequence, a coding sequence, a gene, an exon, an intron, a gene regulatory region, a fragment thereof, or combinations thereof.

[0542] Embodiment 51. The system of Embodiment 49 or 50, wherein the donor nucleic acid comprises a nucleotide sequence of any one of the following genes: BCL11A, PNPLA2, CHD4, CIITA, GATA1, HBA, HBA1, HBA2, HBB, HBD, HBE, HBE1, HBG, HBG1, HBG2, HBM, HBQ1, HBZ, HOXA9, KLF1, MBD3, MYB, TRAC1, ZBTB7A, a fragment thereof, a promoter thereof, an enhancer thereof, or a combination thereof.

[0543] Embodiment 52. The system of any one of Embodiments 49-51, wherein the donor nucleic acid encodes a HBB gene, a BCL11A gene, a HBG1 gene and/or a HBG2 gene, and comprises one or more nucleotide sequences for directing integration into the γ-globin gene.

[0544] Embodiment 53. The system of any one of Embodiments 1-52, wherein the system further comprises an antibody, wherein the antibody is conjugated to one or more components of the system of any one of Embodiments 1-50, and wherein the antibody recognizes and binds HSC.

[0545] Embodiment 54. The system of Embodiment 53, wherein the antibody recognizes CD34+ and CD117.

[0546] Embodiment 55. A system for modifying a target nucleic acid of a cell, the system comprising: (a) an engineered guide nucleic acid, or a nucleic acid encoding the engineered guide nucleic acid, wherein: (i) the engineered guide nucleic acid comprises a first region and a second region, (ii) the second region comprises a nucleotide sequence that is at least 80% identical to any one of repeat sequences recited in TABLE 5 or intermediary sequences recited in TABLE 8, (iii) the second region comprises a nucleotide sequence that is at least 80% identical to any one of spacer sequences recited in TABLE 7, and (iv) the first region and the second region are heterologous to each other; and (b) a polypeptide, or a nucleic acid encoding the polypeptide, wherein: (i) the polypeptide at least partially binds to the first region to form an RNP complex, (ii) the RNP complex, upon hybridization of the second region to the target nucleic, modifies the target nucleic acid of the cell.

[0547] Embodiment 56. The system of Embodiment 55, wherein the polypeptide comprises an amino acid sequence that is at least 85% identical to any one of the amino acid sequences set forth in TABLE 1.

[0548] Embodiment 57. A vector that encodes one or more components of any one of the systems of Embodiments 1-56.

[0549] Embodiment 58. The vector of Embodiment 57 further comprises at least one HSC specific promoter.

[0550] Embodiment 59. The vectors of Embodiment 57 or 58, wherein the vector is a viral vector.

[0551] Embodiment 60. The vector of Embodiment 59, wherein the viral vector is an adeno associated viral (AAV) vector.

[0552] Embodiment 61. The vector of Embodiment 57, wherein the vector is formulated with a lipid or a lipid nanoparticle.

[0553] Embodiment 62. A library of nucleic acid vectors comprising at least one vector of any one of Embodiments 57-60.

[0554] Embodiment 63. A pharmaceutical composition comprising the system of any one of Embodiments 1-56, the vector of any one of Embodiments 57-61, and a pharmaceutically acceptable carrier.

[0555] Embodiment 64. A method of producing an engineered HSC, the method comprising:
[0556] (i) contacting a target nucleic acid of a HSC with the system of any one of Embodiments 1-56, the vector of any one of Embodiments 57-61, or the pharmaceutical composition of Embodiment 63 for a first sufficient period of time to allow for transfection of the HSC; and
[0557] (ii) culturing the HSC for a second sufficient period of time for indels to occur in the target nucleic acid for modifying target nucleic acid and, thereby, producing the engineered HSC.

[0558] Embodiment 65. A method of correcting a mutation that resulted in sickle cell disease (SCD), the method comprising:
[0559] (i) contacting a target nucleic acid of the HSC with the system of any one of Embodiments 1-54, the vector of any one of Embodiments 57-61, or the pharmaceutical composition of Embodiment 63 for a first sufficient period of time to allow for transfection of the HSC; and
[0560] (ii) culturing the HSC for a second sufficient period of time for indels to occur in the target nucleic acid for modifying target nucleic acid, wherein the method results in one or more of inducing homology directed repair (HDR) for the correction of a single mutation, conversing a base of a single mutation, and correcting common clustered mutations for β-thalassemia.

[0561] Embodiment 66. A method of substituting a target sequence of β-globin encoding gene in a HSC, the method comprising:
[0562] (i) contacting a target nucleic acid of the HSC with the system of any one of Embodiments 49-54, the vector of any one of Embodiments 57-61, or the pharmaceutical composition of Embodiment 63 for a first sufficient period of time to allow for transfection of the HSC; and
[0563] (ii) culturing the HSC for a second sufficient period of time for indels to occur in the target nucleic acid for modifying target nucleic acid.

[0564] Embodiment 67. A method of downregulating BCL11A in a HSC, the method comprising:
[0565] (i) contacting a target nucleic acid of the HSC with the system of any one of Embodiments 1-54, the vector of any one of Embodiments 57-61, or the pharmaceutical composition of Embodiment 63 for a first sufficient period of time to allow for transfection of the HSC; and
[0566] (ii) culturing the HSC for a second sufficient period of time for indels to occur in the target nucleic acid for modifying target nucleic acid,
   wherein the method:
[0567] disrupts BCL11A gene by disrupting (e.g., cleaving) the binding motif of one or more transcriptional factors,
[0568] disrupts the binding motif of the transcription inhibitor of γ-globin gene, and/or converts the HBG1 2 promoters to create a novel transcriptional activator.

[0569] Embodiment 68. The method of Embodiment 67, wherein the method disrupts BCL11A gene by disrupting (e.g., cleaving) the binding motif of one or more transcriptional factors, and wherein the method further upregulates γ-globin in the HSC.

[0570] Embodiment 69. The method of Embodiment 68, wherein the binding motif is GATA1.

[0571] Embodiment 70. The method of any one of Embodiments 64-69, wherein the transfection comprises electroporation, viral infection, transfection, lipofection, electroporation, calcium phosphate precipitation, direct microinjection, or combinations thereof.

[0572] Embodiment 71. The method of any one of Embodiments 64-70, wherein the method is performed in vitro or in vivo.

[0573] Embodiment 72. The method of Embodiment 64, wherein the target nucleic acid comprises any one of the target nucleic acid sequences set forth in TABLE 9, a fragment thereof, a variant thereof, a promoter thereof, an enhancer thereof, or a combination thereof.

[0574] Embodiment 73. The method of any one of Embodiments 64-72, wherein the modifying comprises cleaving the target nucleic acid, deleting a nucleic acid of the target nucleic acid, inserting a donor nucleic acid into the target nucleic acid, substituting a nucleic acid of the target nucleic acid with a donor nucleic acid, more than one of the foregoing, or combinations thereof.

[0575] Embodiment 74. The method of Embodiment 73, wherein the modifying results in upregulation of gene expression, downregulation of gene expression, expression of one or more proteins, or a combination thereof.

[0576] Embodiment 75. The method of any one of Embodiments 64-74, wherein the first sufficient time comprises at least about 1 hour, at least about 2 hours, at least about 3 hours, at least about 4 hours, at least about 5 hours or at least about 6 hours.

[0577] Embodiment 76. The method of any one of Embodiments 64-75, wherein the second sufficient time at least 1 day, at least 2 days, at least 3 days, at least 4 days, at least 5 days, or at least 6 days.

[0578] Embodiment 77. The method of any one of Embodiments 64-76, wherein the method further comprises freezing the HSC.

[0579] Embodiment 78. The method of any one of Embodiments 64-77, wherein the method comprises no other agent that alters ability of the engineered HSC to self-renew and/or differentiate into different types of cells.

[0580] Embodiment 79. An engineered HSC, wherein a HSC is modified by the method of any one of Embodiments 64-78.

[0581] Embodiment 80. The engineered HSC of Embodiment 79, wherein the HSC self-renews and/or differentiates into different types of cells.

[0582] Embodiment 81. The engineered HSC of Embodiment 80, wherein the different types of cells comprise a population of hematopoietic stem and progenitor cells (HSPCs), a blood cell, a myeloid cell, a lymphoid cell, a myeloid common progenitor cell, a megakaryocytes-erythrocyte progenitor cell, a granulocytes-macrophages progenitor cell, a monocytic-dendritic progenitor cell, or a lymphoid common progenitor cell.

[0583] Embodiment 82. A pharmaceutical composition comprising the engineered HSC of any one of Embodiments 79-81, and a pharmaceutically acceptable carrier.

[0584] Embodiment 83. The method of treating a disease or disorder comprising administering the engineered HSC of any one of Embodiments 79-81 or the pharmaceutical composition of Embodiment 80.

[0585] Embodiment 84. The method of Embodiment 83, wherein the disease or disorder is any one of the diseases or disorders set forth in TABLE 12.

### Sequences and Tables

[0586] TABLE 1 provides illustrative amino acid sequences of effector proteins that are useful in the compositions, systems and methods described herein.

TABLE 1
Exemplary Effector Protein Amino Acid Sequence For

| Name | Amino Acid Sequence |
|---|---|
| CasM. | MSVLTRKVQLIPVGDKEERDRVYKYLRDGIEAQNRAMNLYMSGL |
| 265466 WT | YFAAINEASKEDRKELNQLYSRIATSSKGSAYTTDIEFPTGLASTST |
| | LSMAVRQDFTKSLKDGLMYGRVSLPTYRKDNPLFVDVRFVALRG |
| | TKQKYNGLYHEYKSHTEFLDNLYSSDLKVYIKFANDITFQVIFGNP |
| | RKSSALRSEFQNIFEEYYKVCQSSIQFSGTKIILNMAMDIPDKEIEL |
| | DEDVCVGVDLGIAIPAVCALNKNRYSRVSIGSKEDFLRVRTKIRNQ |
| | RKRLQTNLKSSNGGHGRKKKMKPMDRFRDYEANWVQNYNHYV |
| | SRQVVDFAVKNKAKYINLENLEGIRDDVKNEWLLSNWSYYQLQQ |
| | YITYKAKTYGIEVRKINPYHTSQRCSCCGYEDAGNRPKKEKGQAY |
| | FKCLKCGEEMNADFNAARNIAMSTEFQSGKKTKKQKKEQHENK |
| | (SEQ ID NO: 1) |
| CasPhi.12 WT | MIKPTVSQFLTPGFKLIRNHSRTAGLKLKNEGEEACKKFVRENEIP |
| | KDECPNFQGGPAIANIIAKSREFTEWEIYQSSLAIQEVIFTLPKDKLP |
| | EPILKEEWRAQWLSEHGLDTVPYKEAAGLNLIIKNAVNTYKGVQ |
| | VKVDNKNKNNLAKINRKNEIAKLNGEQEISFEEIKAFDDKGYLLQ |
| | KPSPNKSIYCYQSVSPKPFITSKYHNVNLPEEYIGYYRKSNEPIVSP |
| | YQFDRLRIPIGEPGYVPKWQYTFLSKKENKRRKLSKRIKNVSPILGI |
| | ICIKKDWCVFDMRGLLRTNHWKKYHKPTDSINDLFDYFTGDPVID |
| | TKANVVRFRYKMENGIVNYKPVREKKGKELLENICDQNGSCKLA |
| | TVDVGQNNPVAIGLFELKKVNGELTKTLISRHPTPIDFCNKITAYR |
| | ERYDKLESSIKLDAIKQLTSEQKIEVDNYNNNFTPQNTKQIVCSKL |
| | NINPNDLPWDKMISGTHFISEKAQVSNKSEIYFTSTDKGKTKDVM |
| | KSDYKWFQDYKPKLSKEVRDALSDIEWRLRRESLEFNKLSKSREQ |
| | DARQLANWISSMCDVIGIENLVKKNNFFGGSGKREPGWDNFYKP |
| | KKENRWWINAIHKALTELSQNKGKRVILLPAMRTSITCPKCKYCD |
| | SKNRNGEKFNCLKCGIELNADIDVATENLATVAITAQSMPKPTCE |
| | RSGDAKKPVRARKAKAPEFHDKLAPSYTVVLREAV (SEQ ID NO: 2) |

| Name | Amino Acid Sequence | Name | Amino Acid Sequence |
|---|---|---|---|
| CasM.19498 | SEQ ID NO: 569 | CasM.284833 | SEQ ID NO: 636 |
| CasM.19548 | SEQ ID NO: 570 | CasM.286910 | SEQ ID NO: 637 |
| CasM.19948 | SEQ ID NO: 571 | CasM.287896 | SEQ ID NO: 638 |
| CasM. | SEQ ID NO: 572 | CasM.288518 | SEQ ID NO: 639 |
| 2390217 | | | |
| CasM.270012 | SEQ ID NO: 573 | CasM.288668 | SEQ ID NO: 640 |
| CasM.272451 | SEQ ID NO: 574 | CasM.288712 | SEQ ID NO: 641 |
| CasM.285333 | SEQ ID NO: 575 | CasM.289802 | SEQ ID NO: 642 |
| CasM.286285 | SEQ ID NO: 576 | CasM.292335 | SEQ ID NO: 643 |
| CasM.287128 | SEQ ID NO: 577 | CasM.293891 | SEQ ID NO: 644 |
| CasM.287826 | SEQ ID NO: 578 | CasM.294491 | SEQ ID NO: 645 |
| CasM.287936 | SEQ ID NO: 579 | CasM.294537 | SEQ ID NO: 646 |
| CasM.288450 | SEQ ID NO: 580 | CasM.294655 | SEQ ID NO: 647 |
| CasM.289248 | SEQ ID NO: 581 | CasM.295047 | SEQ ID NO: 648 |
| CasM.289726 | SEQ ID NO: 582 | CasM.297599 | SEQ ID NO: 649 |
| CasM.290380 | SEQ ID NO: 583 | CasM.297894 | SEQ ID NO: 650 |
| CasM.292901 | SEQ ID NO: 584 | CasM.298538 | SEQ ID NO: 651 |
| CasM.294406 | SEQ ID NO: 585 | CasM.299588 | SEQ ID NO: 652 |
| CasM.298142 | SEQ ID NO: 586 | CasM.19910 | SEQ ID NO: 653 |
| CasM.298248 | SEQ ID NO: 587 | CasPhi.1 | SEQ ID NO: 654 |
| CasM.298264 | SEQ ID NO: 588 | CasPhi.2 | SEQ ID NO: 655 |
| CasM.298446 | SEQ ID NO: 589 | CasPhi.3 | SEQ ID NO: 656 |
| CasM.298612 | SEQ ID NO: 590 | CasPhi.4 | SEQ ID NO: 657 |
| CasM.19924 | SEQ ID NO: 591 | CasPhi.5 | SEQ ID NO: 658 |
| CasM.19952 | SEQ ID NO: 592 | CasPhi.6 | SEQ ID NO: 659 |
| CasM.20054 | SEQ ID NO: 593 | CasPhi.7 | SEQ ID NO: 660 |
| CasM.265291 | SEQ ID NO: 594 | CasPhi.8 | SEQ ID NO: 661 |
| CasM.274429 | SEQ ID NO: 595 | CasPhi.9 | SEQ ID NO: 662 |
| CasM.274559 | SEQ ID NO: 596 | CasPhi.10 | SEQ ID NO: 663 |
| CasM.277378 | SEQ ID NO: 597 | CasPhi.11 | SEQ ID NO: 664 |
| CasM.279423 | SEQ ID NO: 598 | CasPhi.13 | SEQ ID NO: 665 |
| CasM.280852 | SEQ ID NO: 599 | CasPhi.14 | SEQ ID NO: 666 |
| CasM.282673 | SEQ ID NO: 600 | CasPhi.15 | SEQ ID NO: 667 |
| CasM.282952 | SEQ ID NO: 601 | CasPhi.16 | SEQ ID NO: 668 |
| CasM.283262 | SEQ ID NO: 602 | CasPhi.17 | SEQ ID NO: 669 |
| CasM.284933 | SEQ ID NO: 603 | CasPhi.18 | SEQ ID NO: 670 |
| CasM.286251 | SEQ ID NO: 604 | CasPhi.19 | SEQ ID NO: 671 |
| CasM.286588 | SEQ ID NO: 605 | CasPhi.20 | SEQ ID NO: 672 |
| CasM.286678 | SEQ ID NO: 606 | CasPhi.21 | SEQ ID NO: 673 |
| CasM.287700 | SEQ ID NO: 607 | CasPhi.22 | SEQ ID NO: 674 |
| CasM.287908 | SEQ ID NO: 608 | CasPhi.23 | SEQ ID NO: 675 |
| CasM.288480 | SEQ ID NO: 609 | CasPhi.24 | SEQ ID NO: 676 |
| CasM.289206 | SEQ ID NO: 610 | CasPhi.25 | SEQ ID NO: 677 |
| CasM.290598 | SEQ ID NO: 611 | CasPhi.26 | SEQ ID NO: 678 |
| CasM.290816 | SEQ ID NO: 612 | CasPhi.27 | SEQ ID NO: 679 |
| CasM.291449 | SEQ ID NO: 613 | CasPhi.28 | SEQ ID NO: 680 |
| CasM.291507 | SEQ ID NO: 614 | CasPhi.29 | SEQ ID NO: 681 |
| CasM.292139 | SEQ ID NO: 615 | CasPhi.30 | SEQ ID NO: 682 |
| CasM.293203 | SEQ ID NO: 616 | CasPhi.31 | SEQ ID NO: 683 |
| CasM.293410 | SEQ ID NO: 617 | CasPhi.32 | SEQ ID NO: 684 |
| CasM.293576 | SEQ ID NO: 618 | CasPhi.33 | SEQ ID NO: 685 |
| CasM.294190 | SEQ ID NO: 619 | CasPhi.34 | SEQ ID NO: 686 |
| CasM.294270 | SEQ ID NO: 620 | CasPhi.35 | SEQ ID NO: 687 |
| CasM.294601 | SEQ ID NO: 621 | CasPhi.36 | SEQ ID NO: 688 |
| CasM.295071 | SEQ ID NO: 622 | CasPhi.37 | SEQ ID NO: 689 |
| CasM.295105 | SEQ ID NO: 623 | CasPhi.38 | SEQ ID NO: 690 |
| CasM.295187 | SEQ ID NO: 624 | CasPhi.39 | SEQ ID NO: 691 |
| CasM.295201 | SEQ ID NO: 625 | CasPhi.41 | SEQ ID NO: 692 |
| CasM.295231 | SEQ ID NO: 626 | CasPhi.42 | SEQ ID NO: 693 |
| CasM.295929 | SEQ ID NO: 627 | CasPhi.43 | SEQ ID NO: 694 |
| CasM.296640 | SEQ ID NO: 628 | CasPhi.44 | SEQ ID NO: 695 |
| CasM.296642 | SEQ ID NO: 629 | CasPhi.45 | SEQ ID NO: 696 |
| CasM.298706 | SEQ ID NO: 630 | CasPhi.46 | SEQ ID NO: 697 |
| CasM.299584 | SEQ ID NO: 631 | CasPhi.47 | SEQ ID NO: 698 |
| CasM.277328 | SEQ ID NO: 632 | CasPhi.48 | SEQ ID NO: 699 |
| CasM.280604 | SEQ ID NO: 633 | CasPhi.49 | SEQ ID NO: 700 |
| CasM.281050 | SEQ ID NO: 634 | CasPhi12j. | SEQ ID NO: 701 |
| | | 12_L17_18_del1 | |
| CasM.281060 | SEQ ID NO: 635 | CasPhi12j. | SEQ ID NO: 702 |
| | | 12_L17_18_del2 | |

[0587] TABLE 2 provides illustrative sequences of exemplary variants of polypeptides described herein that are useful in the compositions, systems and methods described herein.

TABLE 2
Exemplary Amino Acid Substitutions

| | | Exemplary |
|---|---|---|
| | | Effector |
| | | Protein |
| Relative | | Activity |
| to SEQ | | Altered by |
| ID No. | Positions of Amino Acid Substitutions | Substitution |
| 1 | K58R, K58K, K58H, I80R, 180K, 180H, T84R, T84K, T84H, | Modified |
| | K105R, K105K, K105H, N193R, N193K, N193H, C202R, | nuclease |
| | C202K, C202H, S209R, S209K, S209H, G210R, G210K, | activity |
| | G210H, A218R, A218K, A218H, D220R, D220K, D220H, | |
| | E225R, E225K, E225H, C246R, C246K, C246H, N286R, | |
| | N286K, N286H, M295R, M295K, M295H, M298R, M298K, | |
| | M298H, A306R, A306K, A306H, Y315R, Y315K, Y315H, | |
| | Q360R, Q360K, Q360H, N58K | |
| 1 | I80R, T84R, K105R, C202R, G210R, A218R, D220R, E225R, | Enhanced |
| | C246R, Q360R, I80K, T84K, G210K, N193K, C202K, A218K, | nuclease |
| | D220K, E225K, C246K, N286K, A306K, Q360K, I80H, T84H, | activity |
| | K105H, G210H, C202H, A218H, D220H, E225H, C246H, | |
| | Q360H, K58W, S209F, M295W, M298L, Y315M | |
| 1 | D220R/A306K, D220R/K250N, D418A/K58W, | Enhanced |
| | D418N/K58W* | nuclease |
| | | activity |
| 1 | D237A, D418A, D418N, E335A, E335Q | Reduced |
| | | nuclease |
| | | activity; |
| | | Dead |
| | | nuclease |
| | | (dCas) |
| 2 | I2R, I2K, I2H, 5K, T5H, T11R, G13R, G13H, G13K, F14R, | Modified |
| | F14H, F14K, K15R, K15H, L16R, L16H, L16K, L16F, I17R, | nuclease |
| | I17H, I17K, R18H, R18K, R18R, N19R, N19H, N19K, N19V, | activity |
| | H20R, H20K, S21R, S21H, S21K, R22H, R22K, R22R, T23R, | |
| | T23H, T23K, A24R, A24H, A24K, G25R, G25H, G25K, L26H, | |
| | L28R, L28H, L28K, K29R, K29H, N30R, N30H, N30K, E31R, | |
| | E31H, E31K, G32R, G32H, G32K, E33R, E33H, E33K, E34R, | |
| | E34H, E34K, A35R, A35H, A35K, C36R, C36H, C36K, K37R, | |
| | K37H, K38R, K38H, F39R, F39H, F39K, V40R, V40H, V40K, | |
| | R41H, R41K, R41R, E42R, E42H, E42K, N43R, N43H, N43K, | |
| | N43A, E44R, E44H, E44K, P46S, D48Y, C50K, C50P, P51R, | |
| | P51H, P51K, N52R, N52H, N52K, F53R, F53H, F53K, F509A, | |
| | Q54H, Q54K, G55R, G55H, G55K, G56R, G56H, G56K, | |
| | P57R, P57H, P57K, A58W, A58F, I59K, I59R, I62K, K65W, | |
| | K65F, E68P, T70E, E71K, E73W, E73F, E73P, I74W, 174F, | |
| | Y75W, Y75F, S77V, S78K, S78D, L79R, A80K, E83K, V84Y, | |
| | V84K, T87G, T87D, P89T, P89K, K90E, P94E, P94Q, P94K, | |
| | E95K, P96K, I97R, K99R, K99H, K99S, E100K, E101K, | |
| | W102T, W106N, W106K, L107F, S108R, S108H, S108K, | |
| | E109R, E109H, E109K, E109A, H110R, H110K, H110T, | |
| | G111R, G111H, G111K, L112R, L112H, L112K, L112E, | |
| | D113R, D113H, D113K, T114R, T114H, T114K, V115R, | |
| | V115H, V115K, P116R, P116H, P116K, P116G, Y117R, | |
| | Y117H, Y117K, K118R, K118H, E119R, E119H, E119K, | |
| | A120R, A120H, A120K, A121R, A121H, A121K, G122R, | |
| | G122H, G122K, L123R, L123H, L123K, N124R, N124H, | |
| | N124K, L125R, L125H, L125K, I126R, I126H, I126K, I127R, | |
| | I127H, I127K, K128R, K128H, N129R, N129H, N129K, | |
| | A130R, A130H, A130K, V131R, V131H, V131K, N132R, | |
| | N132H, N132K, T133R, T133H, T133K, Y134R, Y134H, | |
| | Y134K, K135R, K135H, G136R, G136H, G136K, V137R, | |
| | V137H, V137K, Q138R, Q138H, Q138K, V139H, V139K, | |
| | K146N, N147K, N148E, L149R, L149H, L149K, A150K, | |
| | K151E, N153R, E157R, I158K, A159K, A159N, K160D, | |
| | G163E, S168W, F169F, E171K, F175K, G179R, G179H, | |
| | G179K, Y180R, Y180H, Y180K, L181R, L181H, L181K, | |
| | L182R, L182H, L182K, Q183R, Q183H, Q183K, K184R, | |
| | K184H, K184P, P185R, P185H, P185K, S186H, S186K, | |
| | S186G, S186E, S186R, P187R, P187H, P187K, P187I, N188R, | |
| | N188H, N188K, K189R, K189H, S190R, S190H, S190K, | |
| | S190V, I191R, I191H, I191K, Y192R, Y192H, Y192K, C193R, | |
| | C193H, C193K, Y194R, Y194H, Y194K, Q195R, Q195H, | |
| | Q195K, S196R, S196H, S196K, V197R, V197H, V197K, | |
| | S198H, S198K, S198E, P199R, P199H, P199K, K200R, | |
| | K200H, P201R, P201H, P201K, F202R, F202H, F202K, I203R, | |
| | I203H, I203K, I203G, T204R, T204H, T204K, S205R, S205H, | |
| | S205K, K206R, K206H, Y207R, Y207H, Y207K, H208R, | |
| | H208K, N209R, N209H, N209K, N209D, N209W, N209F, | |
| | V210R, V210H, V210K, G218S, G218K, Y220K, S223K, | |
| | S223V, E225K, I227R, V228R, S229R, P230R, Y231K, | |
| | Y231G, Y231R, Q232R, F233R, D234R, L236R, I238R, | |
| | P239R, I240K, G241R, E242R, P243R, G244R, Y245R, | |
| | V246K, V246R, P247R, K248E, K248R, Q250N, Q250R, | |
| | T252D, T252R, F253R, L254R, S255R, K256E, K256R, | |
| | K257R, E258R, N259R, K260R, R262D, L264R, S265R, | |
| | K266R, I268R, S272Q, P273A, G276V, C279R, I280K, | |
| | K281R, K281H, C285V, V286K, T295N, T295F, T295W, | |
| | H297A, H297R, W298L, Y301L, H302F, H302W, P304E, | |
| | P304K, D306K, D306F, L311T, F312L, F315M, F315K, | |
| | T316R, T316H, T316K, V328N, R329T, M334E, I338S, | |
| | N340S, N340F, K348R, K348H, N355R, N355H, N355K, | |
| | I356W, I356F, C357L, C357E, C357K, N360K, G361R, | |
| | C363V, A366V, V368K, V370L, K384T, L390H, T391W, | |
| | K392A, K392E, T393K, T393E, 1395Q, R397K, P399F, | |
| | P399Q, T400L, C405L, C405R, K407E, F445S, S472R, | |
| | K480L, V483G, G497K, G497R, D501K, M503K, W509A, | |
| | Q511R, Q511H, Q511K, D512R, D512H, D512K, Y513R, | |
| | Y513H, Y513K, K514R, K514H, P515R, P515H, P515K, | |
| | K516R, K516H, L517R, L517H, L517K, D523K, S526N, | |
| | E529K, E529L, E536A, R531E, S536A, N540R, N540H, | |
| | N540K, K541R, K541H, L542R, L542H, L542K, S543R, | |
| | S543H, S543K, K544R, K544H, S545R, S545H, S545K, | |
| | R546H, R546K, R546R, D549L, G577H, G585R, Y590R, | |
| | Y590H, Y590K, K591R, K591H, P592R, P592H, P592K, | |
| | K593R, K593H, K594R, K594H, E595R, E595H, E595K, | |
| | N596R, N596H, N596K, W599F, A602R, A602H, A602K, | |
| | I603R, I603H, I603K, H604R, H604K, K605R, K605H, | |
| | A606R, A606H, A606K, L607R, L607H, L607K, L607F, | |
| | T608R, T608H, T608K, Q612R, R617Y, L620E, M624A, | |
| | K634G, K639E, I653A, A673G, A673R, Q674R, Q674K, | |
| | K678R, P679R, E682R, S684R, G685R, A696R, P699R, | |
| | D703R, P707H, P707K, Y709R, E715R, A716R, K15K, H20H, | |
| | K37K, K38K, Q79K, Q79H, K92R, K92K, K92H, K99K, | |
| | H110H, K118K, K135K, N148R, N148K, N148H, E157K, | |
| | E157H, E164R, E164K, E164H, E166R, E166K, E166H, | |
| | E170R, E170K, E170H, K184K, K189K, K200K, K206K, | |
| | H208H, Y220R, Y220H, S223R, S223H, E258H, K281K, | |
| | K348K, S362R, S362K, S362H, N406R, N406H, K435R, | |
| | K435K, K435H, I471R, I471K, I471H, I489R, I489K, I489H, | |
| | Y490R, Y490K, Y490H, F491R, F491K, F491H, D495R, | |
| | D495K, D495H, K496R, K496K, K496H, K498R, K498K, | |
| | K498H, K500R, K500K, K500H, D501R, D501H, V502R, | |
| | V502K, V502H, K504R, K504K, K504H, S505R, S505K, | |
| | S505H, D506R, D506K, D506H, V521R, V521K, V521H, | |
| | N568R, N568K, N568H, S579K, S579H, Q612K, Q612H, | |
| | S638R, S638H, F701K, F701H | |
| 2 | L26R/E109R, L26R/H208R, L26R/K184R, L26R/K38R, | Modified |
| | L26R/L182R, L26R/Q183R, L26R/S108R, L26R/S198R, | nuclease |
| | L26R/T114R, E109R/H208R, E109R/K184R, E109R/K38R, | activity |
| | E109R/L182R, E109R/Q183R, E109R/S108R, E109R/S198R, | |
| | E109R/T114R, H208R/K184R, H208R/K38R, H208R/L182R, | |
| | H208R/Q183R, H208R/S108R, H208R/S198R, H208R/T114R, | |
| | K184R/K38R, K184R/E109R, K184R/H208R, K184R/L182R, | |
| | K184R/Q183R, K184R/S108R, K184R/S198R, K184R/T114R, | |
| | K38R/L182R, K38R/Q183R, K38R/S108R, K38R/S198R, | |
| | K38R/T114R, L182R/Q183R, L182R/S108R, L182R/S198R, | |
| | L182R/T114R, Q183R/S108R, Q183R/S198R, Q183R/T114R, | |
| | S108R/S198R, S108R/T114R, S198R/T114R, S198R/K92E, | |
| | L26R/1268R, L26R/G244R, F701R/K189P, Q612R/E119S, | |
| | F701R/N406K, L26R/E109K, F701R/K435Q, L26R/Y220S, | |
| | L26R/G57R, L26R/A716R, S579R/E119S, K348R/V521T, | |
| | Q612R/S638K, K118R/K189P, F701R/V521T, K118R/K92E, | |
| | Q612R/A121Q, F701R/E119S, L26R/P239R, L26R/Y231R, | |
| | K348R/S223P, L26R/C279R, K348R/E119S, L26R/E100K, | |
| | K348R/N406K, Q612R/E258K, L26R/S255R, F701R/K92E, | |
| | Q612R/N406K, K348R/K189P, S186R/E258K, Q612R/Y220S, | |
| | L26R/N568D, L26R/G241R, F701R/N568D, Q612R/K435Q, | |
| | T5R/N568D, Q612R/V521T, S186R/V521T, K348R/A121Q, | |
| | L26R/D234R, K348R/K92E, S579R/N568D, L26R/A59R, | |
| | Q612R/K92E, L26R/H297R, L26R/E258R, K348R/K435Q, | |
| | L26R/P94K, K348R/I471T, L26R/E119S, S579R/K435Q, | |
| | L26R/Y709R, S198R/N568D, S186R/N568D, L26R/G497R, | |
| | Q612R/N568D, K118R/N568D, L26R/L254R, K348R/E258K, | |
| | L26R/P96K, L26R/Y245R, L26R/1238R, L26R/P243R, | |
| | L26R/L16F, L26R/P230R, L26R/P199R, L26R/G585R, | |
| | K348R/N568D, L26R/A673R, L26R/V246R, L26R/S229R, | |
| | L26R/S265R, L26R/C50P, L26R/F253R, L26R/L264R, | |
| | L26R/1227R, L26R/P247R, L26R/Q250R, L26R/F253R, | |
| | L26R/L264R, L26R/1227R, L26R/P247R* | |
| 2 | L26R/E109R/H208R, L26R/E109R/K184R, | Modified |
| | L26R/E109R/K38R, L26R/E109R/L182R, | nuclease |
| | L26R/E109R/Q183R, L26R/E109R/S108R, | activity |
| | L26R/E109R/S198R, L26R/E109R/T114R, | |
| | L26R/H208R/K184R, L26R/H208R/K38R, | |
| | L26R/H208R/L182R, L26R/H208R/Q183R, | |
| | L26R/H208R/S108R, L26R/H208R/S198R, | |
| | L26R/H208R/T114R, L26R/K184R/H208R, | |
| | L26R/K184R/K38R, L26R/K184R/L182R, | |
| | L26R/K184R/Q183R, L26R/K184R/S108R, | |
| | L26R/K184R/S198R, L26R/K184R/T114R, | |
| | L26R/K38R/L182R, L26R/K38R/Q183R, L26R/K38R/S108R, | |
| | L26R/K38R/S198R, L26R/K38R/T114R, L26R/L182R/Q183R, | |
| | L26R/L182R/S108R, L26R/L182R/S198R, | |
| | L26R/L182R/T114R, L26R/Q183R/K184R, | |
| | L26R/Q183R/H208R, L26R/Q183R/S108R, | |
| | L26R/Q183R/S198R, L26R/Q183R/T114R, | |
| | L26R/S108R/S198R, L26R/S108R/T114R, | |
| | L26R/S198R/T114R, E109R/H208R/K184R, | |
| | E109R/H208R/K38R, E109R/H208R/L182R, | |
| | E109R/H208R/Q183R, E109R/H208R/S108R, | |
| | E109R/H208R/S198R, E109R/H208R/T114R, | |
| | E109R/K184R/K38R, E109R/K184R/L182R, | |
| | E109R/K184R/Q183R, E109R/K184R/S108R, | |
| | E109R/K184R/S198R, E109R/K184R/T114R, | |
| | E109R/K38R/L182R, E109R/K38R/Q183R, | |
| | E109R/K38R/S108R, E109R/K38R/S198R, | |
| | E109R/K38R/T114R, E109R/L182R/Q183R, | |
| | E109R/L182R/S108R, E109R/L182R/S198R, | |
| | E109R/L182R/T114R, E109R/Q183R/S108R, | |
| | E109R/Q183R/S198R, E109R/Q183R/T114R, | |
| | E109R/S108R/S198R, E109R/S108R/T114R, | |
| | E109R/S198R/T114R, H208R/K184R/K38R, | |
| | H208R/K184R/L182R, H208R/K184R/Q183R, | |
| | H208R/K184R/S108R, H208R/K184R/S198R, | |
| | H208R/K184R/T114R, H208R/K38R/L182R, | |
| | H208R/K38R/Q183R, H208R/K38R/S108R, | |
| | H208R/K38R/S198R, H208R/K38R/T114R, | |
| | H208R/L182R/Q183R, H208R/L182R/S108R, | |
| | H208R/L182R/S198R, H208R/L182R/T114R, | |
| | H208R/Q183R/S108R, H208R/Q183R/S198R, | |
| | H208R/Q183R/T114R, H208R/S108R/S198R, | |
| | H208R/S108R/T114R, H208R/S198R/T114R, | |
| | K184R/K38R/L182R, K184R/K38R/Q183R, | |
| | K184R/K38R/S108R, K184R/K38R/S198R, | |
| | K184R/K38R/T114R, K184R/L182R/Q183R, | |
| | K184R/L182R/S108R, K184R/L182R/S198R, | |
| | K184R/L182R/T114R, K184R/Q183R/S108R, | |
| | K184R/Q183R/S198R, K184R/Q183R/T114R, | |
| | K184R/S108R/S198R, K184R/S108R/T114R, | |
| | K184R/S198R/T114R, K38R/L182R/Q183R, | |
| | K38R/L182R/S108R, K38R/L182R/S198R, | |
| | K38R/L182R/T114R, K38R/Q183R/S108R, | |
| | K38R/Q183R/S198R, K38R/Q183R/T114R, | |
| | K38R/S108R/S198R, K38R/S108R/T114R, | |
| | K38R/S198R/T114R, L182R/Q183R/S108R, | |
| | L182R/Q183R/S198R, L182R/Q183R/T114R, | |
| | L182R/S108R/S198R, L182R/S108R/T114R, | |
| | L182R/S198R/T114R, Q183R/S108R/S198R, | |
| | Q183R/S108R/T114R, Q183R/S198R/T114R, | |
| | S108R/S198R/T114R* | |
| 2 | L26R/E109R/H208R/K184R, L26R/E109R/H208R/K38R, | Modified |
| | L26R/E109R/H208R/L182R, L26R/E109R/H208R/Q183R, | nuclease |
| | L26R/E109R/H208R/S108R, L26R/E109R/H208R/S198R, | activity |
| | L26R/E109R/H208R/T114R, L26R/E109R/K184R/K38R, | |
| | L26R/E109R/K184R/L182R, L26R/E109R/K184R/Q183R, | |
| | L26R/E109R/K184R/S108R, L26R/E109R/K184R/S198R, | |
| | L26R/E109R/K184R/T114R, L26R/E109R/K38R/L182R, | |
| | L26R/E109R/K38R/Q183R, L26R/E109R/K38R/S108R, | |
| | L26R/E109R/K38R/S198R, L26R/E109R/K38R/T114R, | |
| | L26R/E109R/L182R/Q183R, L26R/E109R/L182R/S108R, | |
| | L26R/E109R/L182R/S198R, L26R/E109R/L182R/T114R, | |
| | L26R/E109R/Q183R/S108R, L26R/E109R/Q183R/S198R, | |
| | L26R/E109R/Q183R/T114R, L26R/E109R/S108R/S198R, | |
| | L26R/E109R/S108R/T114R, L26R/E109R/S198R/T114R, | |
| | L26R/H208R/K184R/K38R, L26R/H208R/K184R/L182R, | |
| | L26R/H208R/K184R/Q183R, L26R/H208R/K184R/S108R, | |
| | L26R/H208R/K184R/S198R, L26R/H208R/K184R/T114R, | |
| | L26R/H208R/K38R/L182R, L26R/H208R/K38R/Q183R, | |
| | L26R/H208R/K38R/S108R, L26R/H208R/K38R/S198R, | |
| | L26R/H208R/K38R/T114R, L26R/H208R/L182R/Q183R, | |
| | L26R/H208R/L182R/S108R, L26R/H208R/L182R/S198R, | |
| | L26R/H208R/L182R/T114R, L26R/H208R/Q183R/S108R, | |
| | L26R/H208R/Q183R/S198R, L26R/H208R/Q183R/T114R, | |
| | L26R/H208R/S108R/S198R, L26R/H208R/S108R/T114R, | |
| | L26R/H208R/S198R/T114R, L26R/K184R/K38R/L182R, | |
| | L26R/K184R/K38R/Q183R, L26R/K184R/K38R/S108R, | |
| | L26R/K184R/K38R/S198R, L26R/K184R/K38R/T114R, | |
| | L26R/K184R/L182R/Q183R, L26R/K184R/L182R/S108R, | |
| | L26R/K184R/L182R/S198R, L26R/K184R/L182R/T114R, | |
| | L26R/K184R/Q183R/S108R, L26R/K184R/Q183R/S198R, | |
| | L26R/K184R/Q183R/T114R, L26R/K184R/S108R/S198R, | |
| | L26R/K184R/S108R/T114R, L26R/K184R/S198R/T114R, | |
| | L26R/K38R/L182R/Q183R, L26R/K38R/L182R/S108R, | |
| | L26R/K38R/L182R/S198R, L26R/K38R/L182R/T114R, | |
| | L26R/K38R/Q183R/S108R, L26R/K38R/Q183R/S198R, | |
| | L26R/K38R/Q183R/T114R, L26R/K38R/S108R/S198R, | |
| | L26R/K38R/S108R/T114R, L26R/K38R/S198R/T114R, | |
| | L26R/L182R/Q183R/S108R, L26R/L182R/Q183R/S198R, | |
| | L26R/L182R/Q183R/T114R, L26R/L182R/S108R/S198R, | |
| | L26R/L182R/S108R/T114R, L26R/L182R/S198R/T114R, | |
| | L26R/Q183R/S108R/S198R, L26R/Q183R/S108R/T114R, | |
| | L26R/Q183R/S198R/T114R, L26R/S108R/S198R/T114R, | |
| | E109R/H208R/K184R/K38R, E109R/H208R/K184R/L182R, | |
| | E109R/H208R/K184R/Q183R, E109R/H208R/K184R/S108R, | |
| | E109R/H208R/K184R/S198R, E109R/H208R/K184R/T114R, | |
| | E109R/H208R/K38R/L182R, E109R/H208R/K38R/Q183R, | |
| | E109R/H208R/K38R/S108R, E109R/H208R/K38R/S198R, | |
| | E109R/H208R/K38R/T114R, E109R/H208R/L182R/Q183R, | |
| | E109R/H208R/L182R/S108R, E109R/H208R/L182R/S198R, | |
| | E109R/H208R/L182R/T114R, E109R/H208R/Q183R/S108R, | |
| | E109R/H208R/Q183R/S198R, E109R/H208R/Q183R/T114R, | |
| | E109R/H208R/S108R/S198R, E109R/H208R/S108R/T114R, | |
| | E109R/H208R/S198R/T114R, E109R/K184R/K38R/L182R, | |
| | E109R/K184R/K38R/Q183R, E109R/K184R/K38R/S108R, | |
| | E109R/K184R/K38R/S198R, E109R/K184R/K38R/T114R, | |
| | E109R/K184R/L182R/Q183R, E109R/K184R/L182R/S108R, | |
| | E109R/K184R/L182R/S198R, E109R/K184R/L182R/T114R, | |
| | E109R/K184R/Q183R/S108R, E109R/K184R/Q183R/S198R, | |
| | E109R/K184R/Q183R/T114R, E109R/K184R/S108R/S198R, | |
| | E109R/K184R/S108R/T114R, E109R/K184R/S198R/T114R, | |
| | E109R/K38R/L182R/Q183R, E109R/K38R/L182R/S108R, | |
| | E109R/K38R/L182R/S198R, E109R/K38R/L182R/T114R, | |
| | E109R/K38R/Q183R/S108R, E109R/K38R/Q183R/S198R, | |
| | E109R/K38R/Q183R/T114R, E109R/K38R/S108R/S198R, | |
| | E109R/K38R/S108R/T114R, E109R/K38R/S198R/T114R, | |
| | E109R/L182R/Q183R/S108R, E109R/L182R/Q183R/S198R, | |
| | E109R/L182R/Q183R/T114R, E109R/L182R/S108R/S198R, | |
| | E109R/L182R/S108R/T114R, E109R/L182R/S198R/T114R, | |
| | E109R/Q183R/S108R/S198R, E109R/Q183R/S108R/T114R, | |
| | E109R/Q183R/S198R/T114R, E109R/S108R/S198R/T114R, | |
| | H208R/K184R/K38R/L182R, H208R/K184R/K38R/Q183R, | |
| | H208R/K184R/K38R/S108R, H208R/K184R/K38R/S198R, | |
| | H208R/K184R/K38R/T114R, H208R/K184R/L182R/Q183R, | |
| | H208R/K184R/L182R/S108R, H208R/K184R/L182R/S198R, | |
| | H208R/K184R/L182R/T114R, H208R/K184R/Q183R/S108R, | |
| | H208R/K184R/Q183R/S198R, H208R/K184R/Q183R/T114R, | |
| | H208R/K184R/S108R/S198R, H208R/K184R/S108R/T114R, | |
| | H208R/K184R/S198R/T114R, H208R/K38R/L182R/Q183R, | |
| | H208R/K38R/L182R/S108R, H208R/K38R/L182R/S198R, | |
| | H208R/K38R/L182R/T114R, H208R/K38R/Q183R/S108R, | |
| | H208R/K38R/Q183R/S198R, H208R/K38R/Q183R/T114R, | |
| | H208R/K38R/S108R/S198R, H208R/K38R/S108R/T114R, | |
| | H208R/K38R/S198R/T114R, H208R/L182R/Q183R/S108R, | |
| | H208R/L182R/Q183R/S198R, H208R/L182R/Q183R/T114R, | |
| | H208R/L182R/S108R/S198R, H208R/L182R/S108R/T114R, | |
| | H208R/L182R/S198R/T114R, H208R/Q183R/S108R/S198R, | |
| | H208R/Q183R/S108R/T114R, H208R/Q183R/S198R/T114R, | |
| | H208R/S108R/S198R/T114R, K184R/K38R/L182R/Q183R, | |
| | K184R/K38R/L182R/S108R, K184R/K38R/L182R/S198R, | |
| | K184R/K38R/L182R/T114R, K184R/K38R/Q183R/S108R, | |
| | K184R/K38R/Q183R/S198R, K184R/K38R/Q183R/T114R, | |
| | K184R/K38R/S108R/S198R, K184R/K38R/S108R/T114R, | |
| | K184R/K38R/S198R/T114R, K184R/L182R/Q183R/S108R, | |
| | K184R/L182R/Q183R/S198R, K184R/L182R/Q183R/T114R, | |
| | K184R/L182R/S108R/S198R, K184R/L182R/S108R/T114R, | |
| | K184R/L182R/S198R/T114R, K184R/Q183R/S108R/S198R, | |
| | K184R/Q183R/S108R/T114R, K184R/Q183R/S198R/T114R, | |
| | K184R/S108R/S198R/T114R, K38R/L182R/Q183R/S108R, | |
| | K38R/L182R/Q183R/S198R, K38R/L182R/Q183R/T114R, | |
| | K38R/L182R/S108R/S198R, K38R/L182R/S108R/T114R, | |
| | K38R/L182R/S198R/T114R, K38R/Q183R/S108R/S198R, | |
| | K38R/Q183R/S108R/T114R, K38R/Q183R/S198R/T114R, | |
| | K38R/S108R/S198R/T114R, L182R/Q183R/S108R/S198R, | |
| | L182R/Q183R/S108R/T114R, L182R/Q183R/S198R/T114R, | |
| | L182R/S108R/S198R/T114R, Q183R/S108R/S198R/T114R, | |
| | L26R/Q183R/K184R/T114R | |
| 2 | T5R, L26R, L26K, A121Q, V139R, S198R, S223P, E258K, | Enhanced |
| | I471T, S579R, F701R, P707R, K189P, S638K, Q54R, Q79R, | nuclease |
| | Y220S, N406K, E119S, K92E, K435Q, N568D, V521T | activity |
| 2 | L26K/A121Q, L26R/A121Q, K99R/L149R, K99R/N148R, | Enhanced |
| | L149R/H208R, S362R/L26R L26R/N148R, L26R/H208R, | nuclease |
| | N30R/N148R, L26R/K99R, L26R/P707R, L26R/L149R, | activity |
| | L26R/N30R, L26R/N355R, L26R/K281R, L26R/S108R, | |
| | L26R/K348R, T5R/V139R, I2R/V139R, K99R/S186R, | |
| | L26R/A673G, L26R/Q674R, S579R/L26K, F701R/E258K, | |
| | T5R/L26K, L26R/K435Q, L26R/G685R, L26R/Q674K, | |
| | L26R/P699R, L26R/T70E, L26R/Q232R, L26R/T252R, | |
| | L26R/P679R, L26R/E83K, L26R/E73P, L26R/K248E, L26R, | |
| | T5R/S223P, S579R/S223P, L26R/S223P, T5R/A121Q, | |
| | L26R/A696R, S198R/I471T, L26R/N153R, L26R/E682R, | |
| | L26R/D703R, Q612R/L26K, L26R/I471T, K348R/L26K, | |
| | S579R/I471T, L26R/V228R, T5R/S638K, S579R/K189P, | |
| | S579R/E258K, L26R/K260R, L26R/S638K, S579R/Y220S, | |
| | T5R/I471T, L26R/F233R, L26R/V521T, F701R/A121Q, | |
| | L26R/G361R, S198R/E258K, L26R/S472R, T5R/Y220S, | |
| | L26R/A150K, L26R/S684R, L26R/E157R, L26R/K248R, | |
| | F701R/L26K, S198R/N406K, S198R/Y220S, S198R/S638K, | |
| | S198R/V521T, S579R/A121Q, K348R/Y220S, S198R/K189P, | |
| | L26R/E242R, L26R/K678R, T5R/N406K, L26R/1158K, | |
| | T5R/V521T, L26R/N259R, L26R/K257R, L26R/K256R, | |
| | T5R/K189P, L26R/C405R, S579R/V521T, S579R/N406K, | |
| | T5R/K92E, T5R/E258K, L26R/197R, S579R/S638K, | |
| | T5R/K435Q, F701R/S638K, L26R/L236R, F701R/I471T, | |
| | Q612R/S223P, F701R/S223P, S198R/E119S, S579R/K92E, | |
| | L26R/E715R, Q612R/I471T, F701R/Y220S, S198R/S223P, | |
| | L26R/K266R * | |
| 2 | E157A, E164A, E164L, E166A, E166I, E170A, I489A, I489S, | Nickase |
| | Y490S, Y490A, F491A, F491S, F491G, D495G, D495R, | activity |
| | D495K, K496A, K496S, K498A, K498S, K500A, K500S, | |
| | D501R, D501G, D501K, V502A, V502S, K504A, K504S, | |
| | S505R, D506A | |
| 2 | deletion of S478-S505 and insertion of: | Nickase |
| | SDLYIERGGDPRDVHQQVETKPKGKRKSEIRILKIR (SEQ | activity |
| | ID NO: 897) or | |
| | SDYIVDHGGDPEKVFFETKSKKDKTKRYKRR (SEQ ID | |
| | NO: 898) | |
| 2 | D369A, D369N, D658A, D658N, E567A, E567Q | Reduced |
| | | nuclease |
| | | activity, |
| | | catalytically |
| | | inactive, |
| | | dead protein |
| | | (dCas) |

*wherein “/” indicates simultaneous substitutions

[0588] TABLE 3 provides illustrative sequences of exemplary heterologous polypeptide modifications of effector protein(s) that are useful in the compositions, systems and methods described herein.

TABLE 3
Exemplary Nuclear Localization Sequences

| SEQ ID No. | SEQUENCES |
|---|---|
| 3 | PKKKRKVGIHGVPAA |
| 4 | KRPAATKKAGQAKKKK |
| 5 | KR(K/R)R |
| 6 | (P/R)XXKR(^{∧}D/E)(K/R) |
| 7 | KRX(W/F/Y)XXAF |
| 8 | (R/P)XXKR(K/R)(^{∧}D/E) |
| 9 | LGKR(K/R)(W/F/Y) |
| 10 | KRX₁₀K(K/R)(K/R) |
| 11 | GLFXALLXLLXSLWXLLLXA |
| 12 | K(K/R)RK |
| 13 | KRX₁₁K(K/R)(K/R) |
| 14 | KRX₁₂K(K/R)(K/R) |
| 15 | KRX₁₀K(K/R)X(K/R) |
| 16 | KRX₁₁K(K/R)X(K/R) |
| 17 | KRX₁₂K(K/R)X(K/R) |
| 18 | APKKKRKVGIHGVPAA |

*wherein X is any naturally occurring amino acid; and ^{∧}D/E is any naturally occurring amino acid except Asp or Glu

[0589] TABLE 4 provides illustrative PAM sequences that are useful in the compositions, systems and methods described herein.

TABLE 4
PAM Sequences

| Effector | | |
|---|---|---|
| Protein | SEQ ID | PAM Sequence |
| SEQ ID No. | No. | (5′→3′) |
| 1 | 19 | NNTN |
| 1 | 20 | ANTR |
| 1 | 21 | AATA |
| 1 | 22 | AATC |
| 1 | 23 | AATG |
| 1 | 24 | AATT |
| 1 | 25 | ACTA |
| 1 | 26 | ACTC |
| 1 | 27 | ACTG |
| 1 | 28 | ACTT |
| 1 | 29 | AGTA |
| 1 | 30 | AGTC |
| 1 | 31 | AGTG |
| 1 | 32 | AGTT |
| 1 | 33 | ATTA |
| 1 | 34 | ATTC |
| 1 | 35 | ATTG |
| 1 | 36 | ATTT |
| 1 | 37 | CNTR |
| 1 | 38 | CATA |
| 1 | 39 | CATT |
| 1 | 40 | CCTA |
| 1 | 41 | CCTG |
| 1 | 42 | CCTT |
| 1 | 43 | CTTA |
| 1 | 44 | CTTC |
| 1 | 45 | CTTG |
| 1 | 46 | CTTT |
| 1 | 47 | GNTR |
| 1 | 48 | GATC |
| 1 | 49 | GATG |
| 1 | 50 | GATT |
| 1 | 51 | GCTG |
| 1 | 52 | GTTA |
| 1 or 2 | 53 | GTTC |
| 1 | 54 | GTTG |
| 1 | 55 | GTTT |
| 1 or 611 | 56 | RTTG |
| 1 | 57 | TATA |
| 1 | 58 | TATC |
| 1 | 59 | TATG |
| 1 | 60 | TATT |
| 1 | 61 | TATY |
| 1 | 62 | TCTA |
| 1 | 63 | TCTG |
| 1 | 64 | TCTT |
| 1 | 65 | TGTA |
| 1 | 66 | TGTG |
| 1 | 67 | TGTT |
| 1 | 68 | TNAR |
| 1 | 69 | TNCR |
| 1 | 70 | TNGR |
| 1 | 71 | TNTC |
| 1, 594, | 72 | TNTG |
| 619, or | | |
| 628 | | |
| 1 | 73 | TNTR |
| 1 | 74 | TNTT |
| 1 | 75 | TNVY |
| 1 | 76 | TTTA |
| 1 or 603 | 77 | TTTC |
| 1 or 2 | 78 | TTTG |
| 1 | 79 | TTTT |
| 1 | 80 | VNTY |
| 1 | 81 | NNTR |
| 2, 664, | 82 | TTN |
| 668, 672, | | |
| 678, 680, | | |
| 681, 683, | | |
| 689, 694, | | |
| or 696 | | |
| 2 | 83 | TTA |
| 2, 593, | 84 | TTC |
| 600, 602, | | |
| 607, 617, | | |
| 623, 627, | | |
| or 629 | | |
| 2 or 673 | 85 | TTG |
| 2 | 86 | TTT |
| 2 | 513 | NTTN |
| 569, 571, | 514 | RTTN |
| 578, 685, | | |
| or 691 | | |
| 569, 580, | 515 | TCG |
| 585, 587, | | |
| 589, 592, | | |
| 596, 609, | | |
| 612, or | | |
| 626 | | |
| 569, 574, | 516 | RTTR |
| 579, 581, | | |
| 585, 587, | | |
| 588, 598, | | |
| 604, 610, | | |
| 611, 612, | | |
| or 622 | | |
| 569 | 517 | KRTTN |
| 570, 595, | 518 | CCN |
| or 647 | | |
| 570 or | 519 | CCR |
| 647 | | |
| 590 | 520 | CC |
| 636 | 521 | CTTN |
| 594 | 522 | G |
| 645 | 523 | GNNN |
| 575 | 524 | GTYG |
| 580 or | 525 | KCG |
| 626 | | |
| 592 | 526 | KYG |
| 615 | 527 | KNTK |
| 615 | 528 | KNTT |
| 630 or | 529 | NCTT |
| 650 | | |
| 605, 613, | 530 | NNCC |
| 618, 643, | | |
| 646, or | | |
| 649 | | |
| 651 | 531 | NNTC |
| 591 | 532 | NTCG |
| 603 or | 533 | NTTC |
| 620 | | |
| 608 | 534 | NTTY |
| 620 | 535 | NYTN |
| 573 | 536 | RTT |
| 679 | 537 | RTTS |
| 577 | 538 | RTNG |
| 583, 606, | 539 | RTRG |
| or 631 | | |
| 575 | 540 | RGTYG |
| 636 | 541 | T |
| 594, 619, | 542 | TG |
| 628, or | | |
| 641 | | |
| 601 or | 543 | TY |
| 627 | | |
| 631 | 544 | TTR |
| 686, 687, | 545 | TTS |
| or 695 | | |
| 601, 624, | 546 | TTY |
| or 627 | | |
| 616, 625, | 547 | TYN |
| 657, 667, | | |
| 676, 677, | | |
| or 684 | | |
| 690 | 548 | TWN |
| 600 or | 549 | TTCN |
| 602 | | |
| 629 | 550 | TTNY |
| 634 | 551 | TTTN |
| 597, 617, | 552 | TTYN |
| 632, or | | |
| 653 | | |
| 636 | 553 | TYYT |
| 617 | 554 | TYYW |
| 614 | 555 | WNCT |
| 619 | 556 | WYTG |
| 631 | 557 | WTTR |
| 619, 628, | 558 | WNTG |
| or 641 | | |
| 653 | 559 | WTTYN |
| 597 or | 560 | YN |
| 636 | | |
| 614 | 561 | YT |
| 593 | 562 | YTC |
| | 563 | YTTN |
| 597 or | 564 | YTTR |
| 632 | | |
| 573 | 565 | ANRTT |
| 625 | 566 | WWTTN |
| 625 | 567 | TTTYN |
| 682 | 568 | VTTN |
| 574 | 859 | RTWG |

*wherein each Nis any nucleotide, each R is A or G, and each V is A, C or G.

[0590] TABLE 5 provides illustrative repeat sequences for use in guide nucleic acids that are useful in the compositions, systems and methods described herein.

TABLE 5
Exemplary Repeat Sequences

| Effector | | |
|---|---|---|
| Protein SEQ | SEQ | |
| ID No. | ID No. | Repeat sequence (5′→3′), shown as RNA |
| 1 | 251 | AAGGAUGCCAAAC |
| 2 | 252 | AUAGAUUGCUCCUUACGAGGAGAC |
| 2 | 253 | AUUGCUCCUUACGAGGAGAC |
| 2 | 254 | CUUUCAAGACUAAUAGAUUGCUCCUUACGAGGAGAC |
| 1 | 703 | GTTTGAGAACCTTATGAAATTACAAGGATGCCAAAC |
| 572 | 704 | AGCAGAATACAAC |
| 591 | 705 | GUUGUGAAUGCAGGCAUUUUUGAUGGUAAAUCCAAC |
| 592 | 706 | ACUGUCAGACAAUGCAAAAUGUGUGGUACAUCCAAC |
| 593 | 707 | GUUGAGCUCUGCAUUACGCAGAUGAAUGACGAG |
| 593, 600, 602, | 708 | GAUAUAUCUUGUAUGCAUAUGUAGGUUGUGAG |
| 614, 617, 623, | | |
| 624, 634, 636 | | |
| 594 | 709 | GGUGGAUAUCAUCUUAAAAAGUGAGGUACAUCCAAC |
| 595 | 710 | GGUGUGAACGACCUUUUUUUGCGGUGUAAUUCGAGG |
| 584, 596, 598 | 711 | GCUGUCAGUAGUAGUAAAAAUGGGGGUACAUCCAAC |
| 593, 597, 600, | 712 | GUUGCAACUUACGCAUAGGUGUAAAAUACGAGG |
| 602, 607, 614, | | |
| 617, 623 | | |
| 598, 599, 621 | 713 | GUUGCAGAACCCGAAUAGACGAAUGAAGGAAUGCAAC |
| 600 | 714 | GAUGCAACUUAGAUGCAUAUGUAAGUUGUGAG |
| 600, 601, 602, | 715 | GUUGCAAUGAACGUAUGUGCAUGAGGUGUGAG |
| 614, 617, 623, | | |
| 627 | | |
| 601 | 716 | GUUGCAAUCUGCGUACAGGCGUAAGAUGUGAG |
| 602, 623 | 717 | GAUCAUAUCUGCUUGUAUGGGUAUGCUGCGAG |
| 603, 648 | 718 | GUUGCAGCGUGCGCGAGCGUGUGGCUUGAAGG |
| 604, 622 | 719 | ACUGUCAGUACAUGCAAAAAUGAGGGUACAUCCAAC |
| 605 | 720 | GGUGUAUGUAACCGCAAUUUGAAGGGUGCAUACAGG |
| 605, 613, 649 | 721 | GUUGUAGUCGACCUGAAUCUGUGGGGUGCUUACAGG |
| 606 | 722 | GCUGUAAGUCAUGGAAAAAUGGUGAGUACAUCCAAC |
| 607 | 723 | GAUUAUAUCUGCUUGUAUGGGUAUACUGCGAG |
| 608 | 724 | GUUGCAACUCGCACGUGAAUGCGACUUGAAGG |
| 609 | 725 | ACUGUCAGACAAUGCAAAAUGAGUGGUACAUCCAAC |
| 610 | 726 | GCUGCAUGUCAUGGCAAAAGGAAAGGUACAUCCAAC |
| 611 | 727 | GCUGUCAGACACCUAAAAAAUGAGGGUACAUCCAAC |
| 612, 626 | 728 | GCUGUGAGUCACAGUAAAAAUGAAGGUAUAUCCAAC |
| 613 | 729 | GCUGUAGCCCUGCUCAAAUUGUAGGGCGCAUGCAGG |
| 614, 636 | 730 | GUUGCAACUUACGCAUAGGUGUAAAAUACGAG |
| 615 | 731 | GAUGUAUAUGCUAUGAUUUUGUAUGGUACAUCCAAC |
| 616 | 732 | GAUGUGAACGACCUUUUUUUGCGGUGUACUUCGAGG |
| 617 | 733 | UCAGCUCACAACCUACAUAUGCAUACAAGAUAUAUCG |
| | | U |
| 618 | 734 | GUUGGAGUCGGCUUGAAUCUGCGGGGUGCUUACAGG |
| 619 | 735 | GAUGUAAAUCAUCUAUAAAAGAAAGGUACAUCCAAC |
| 620 | 736 | GAUGCAUCUGACACAGCUGGGUGAGUUGAAGG |
| 625 | 737 | AUUGUAGGCGACCUUUUUUUGCGAUGUAGUUCGAGG |
| 628 | 738 | AGUGUAUGAUUACCUGUAGUAUGAGGUACAUCCAAC |
| 600, 602, 617, | 739 | GUUGCAAUUCGUAUGCGCAGGUAAGUUUCGAG |
| 623, 629-630 | | |
| 630 | 740 | CGUUGCAGCUCGCACGUUGGCACUGGUUGAAGG |
| 630 | 741 | CGUUGCAGCUCGCACGUUGGCACUGGGUUGAAGG |
| 631 | 742 | GAUAGUUUUAACUUCCAUUUGAAAUGUAAAUGCAAC |
| 632 | 743 | GCUGCAACACGCGCGGGUACGCGGGUUGAAGG |
| 633 | 744 | GUUGCAACUCACGCGCGUAUGUGGCUUGAAGG |
| 634 | 745 | AAUGUGAACGACCUUCUUUUGCGGUGUACUUCGAGG |
| 635 | 746 | GUUGCAAUUCAUAUCUCCGGGUGGAUUGAAGG |
| 637, 646 | 747 | GUUGGAAUCGACCUUAAUUUGAGGUGUGCUUACAGG |
| 638 | 748 | GUUGCGUUUGCCCGUGAUUUCGGGUGUGUAUACAGG |
| 639 | 749 | GAUGCAACUCGUGUGUAUGUGCGAGUUGAAGG |
| 640 | 750 | GCUGUUAGAACAUACAAAAUGAAAGGUACAUCCAAC |
| 641 | 751 | GGCGUAUGUCUACCUGAAAAAGAAGGUAUAUCCAAC |
| 642 | 752 | GGUGUAUGUGCACCAUAUAUGUAGGUGACAUACAGC |
| 643 | 753 | GCUGAAAGAGCAGAGAAUUUGUUGUGUGCAUACAGG |
| 644 | 754 | GACGCAACUCGCGCGCGGGCAUGUAUUGAGGG |
| 645 | 755 | GUUGCAACACAUGUAUGUGGGUGAGUUGAAGG |
| 647 | 756 | GCUGCACUGCACCGCCCAUUGAUGGUGUGCUCUAGG |
| 650 | 757 | GUUGCAACUCGCACGUUGGCACUGAUUGAAGG |
| 651 | 758 | GUUGUAAGAGACCCGAAUUUUAGCUGUGUAUACAGG |
| 652 | 759 | GUUGCAAUUUGUAUACGAGUGUGACUUGAAGG |
| 653 | 760 | GAUGUGAACGACCUUUUUUUGCGGUGUGCUUCGAGG |
| 654 | 761 | GGAGAGAUCUCAAACGAUUGCUCGAUUAGUCGAGAC |
| 655 | 762 | GUCGGAACGCUCAACGAUUGCCCCUCACGAGGGGAC |
| 657, 670 | 763 | ACCAAAACGACUAUUGAUUGCCCAGUACGCUGGGAC |
| 660, 666 | 764 | GGAUCCAAUCCUUUUUGAUUGCCCAAUUCGUUGGGAC |
| 663 | 765 | GGAUCUGAGGAUCAUUAUUGCUCGUUACGACGAGAC |
| 664, 668 | 766 | GUCUCAGCGUACUGAGCAAUCAAAAGGUUUCGCAGG |
| 665 | 767 | GUAGAAGACCUCGCUGAUUGCUCGGUGCGCCGAGAC |
| 669 | 768 | AUGGCAACAGACUCUCAUUGCGCGGUACGCCGCGAC |
| 671 | 769 | GUCGCUCUCUAACGCUUGCCCAGUACGCUGGGAC |
| 673, 674 | 770 | GGUUGAACCCUCAACAGAUUGCUCGGUAAGCCGAGAC |
| 675 | 771 | CUUGAAAUCCUGUCAGAUUGCUCCCUUCGGGGAGAC |
| 676, 677 | 772 | GCUGGAAGACUCAAUGAUGGCUCCUUACGAGGAGAC |
| 678 | 773 | CUAGGAACGCACGCAGAUUGCUCGGUACGCCGAGAC |
| 679 | 774 | AUUGCAACGCCUAAAGAUUGCUCGAUACGUCGAGAC |
| 680 | 775 | GUUCGGCRAYCCUUUGAUUGCUCAGUACGCUGAGAC |
| 681 | 776 | GUUGAACCUAGAUCAGAUGGCUCAGUACGCUGAGAC |
| 682 | 777 | CCCUCAACACGUCAGAAAUGCCCGGCACGCCGGGAC |
| 683 | 778 | GUCGCAAGACUCGAAUAAUUGCCCCUCUAUGGGGAC |
| 684 | 779 | GCUGGGGACCGAUCCUGAUUGCUCGCUGCGGCGAGAC |
| 685 | 780 | CUCUCAAUGGAUAACGAUUGCUCUCUACGGAGAGAC |
| 686 | 781 | GUUGAACCCUCAACAGAUUGCUCGGUAAGCCGAGAC |
| 696 | 782 | ACUGAAACCACCAACGAUUGCGCUCCUCGGAGCGAC |
| 569, 571, 575, | 783 | AGGUACAUCCAAC |
| 628 | | |
| 569, 573-574, | 784 | UGGUACAUCCAAC |
| 578-579, 581, | | |
| 585, 587-589, | | |
| 591-592, 596, | | |
| 598, 604, | | |
| 609-612, 615, | | |
| 622, 626 | | |
| 570, 595 | 785 | UGCGGUGUAAUUCGAGG |
| 576 | 786 | AAGGUUGAUACAGC |
| 577 | 787 | GAGCACAUCCAAC |
| 578, 583, 585 | 788 | GGGUACAUCCAAC |
| 580 | 789 | AGGUAUAUCCAAC |
| 582 | 790 | GGCUACAUACAGC |
| 584, 586 | 792 | AAAACAAGGAUUGAAAC |
| 590 | 793 | GCUGCAAGAGCUCCUAAUUUGAGGGGUGCAUACAGG |
| 592 | 794 | UGGUACAUCC |
| 592 | 795 | UGGGGCAGUUGGUUGCCCUUAGCCUGAGGCAUUUAUU |
| | | GCACUCGGGAAGUACCAUUACAUCCAAC |
| 592 | 796 | UGGUACAUCCAACUCUAGGCGCC |
| 592 | 797 | AAUGGUACAUCCAAC |
| 592 | 798 | UGGUACAUCCAACUCUAGGC |
| 592 | 799 | UGGUACAUCCAACUCUAGGCGC |
| 592 | 800 | UGGUACAUCCAACUCUAGGCG |
| 592 | 801 | UGGUACAUCCAACUCUAGG |
| 592 | 802 | AAAUGGUACAUCCAAC |
| 592 | 803 | UGGUACAUCCAACUCU |
| 592 | 804 | UGGUACAUCCAACUC |
| 592 | 805 | UGGUACAUCCAACU |
| 592 | 806 | UGGUACAUCCAACUCUAG |
| 592 | 807 | UGGUAUAUCCAAC |
| 592 | 808 | UGGUACAUCCAACUCUA |
| 592 | 809 | AUGGUACAUCCAAC |
| 592 | 810 | UGGUACAUCCAA |
| 592 | 811 | UGGUACAUCCA |
| 601 | 815 | CAGGCGUAAGAUGUGAG |
| 621 | 816 | CGUACGUGGAUUGAAAC |
| 624 | 817 | CAUAUGUAGGUUGUGAG |
| 627 | 818 | CAUGAGGUGUGAG |
| 630 | 819 | CACUGGUUGAAGG |
| 603 | 820 | AGCGUGUGGCUUGAAGG |
| 606 | 821 | AUGGUGAGUACAUCCAAC |
| 625 | 822 | AUGUAGUUCGAGG |
| 631 | 823 | AUGUAAAUGCAAC |
| 599 | 824 | AGAAGAAGGAUUGGGAC |
| 624 | 825 | UGUAGGUUGUGAG |
| 603 | 826 | UGUGGCUUGAAGG |
| 605, 613, 618 | 827 | UGUGGGGUGCUUACAGG |
| 600, 601, 602, | 828 | UGUGCAUGAGGUGUGAG |
| 617, 623, 627 | | |
| 630 | 829 | UUGGCACUGGUUGAAGG |
| 608 | 830 | UGAAUGCGACUUGAAGG |
| 602 | 831 | UAUGGGUAUGCUGCGAG |
| 595 | 832 | UUGCGGUGUACUUCGAGG |
| 616 | 833 | GUGUACUUCGAGG |
| 619 | 834 | GGUACAUCCAAC |
| 620 | 835 | GCUGGGUGAGUUGAAGG |

[0591] TABLE 6 provides an illustrative linker sequence for use in guide nucleic acids that are useful in the compositions, systems and methods described herein.

TABLE 6
Exemplary Linker Sequence

| | Linker sequence (5′→3′), |
|---|---|
| Seq ID No. | shown as RNA |
| 255 | GAAA |

[0592] TABLE 7 provides illustrative spacer sequences for use in guide nucleic acids that are useful in the compositions, systems and methods described herein.

TABLE 7
Exemplary Spacer Sequences for use in Guide Nucleic Acids

| Effector protein or | Spacer | | |
|---|---|---|---|
| a variant thereof | Sequence | Spacer Sequence (5′→3′), | |
| (SEQ ID No.) | SEQ ID No. | shown as RNA | Target Loci |
| 2 | 860 | CCCCACAGGGCAGUAAC | HBB E6 |
| 2 | 861 | GAGUAUCCAGUGAGGCC | BCL11A |
| | | | binding site in |
| | | | the promoter of |
| | | | HBG1 & HBG2 |
| 2 | 862 | GUCAAGGCAAGGCUGGC | BCL11A |
| | | | binding site in |
| | | | the promoter of |
| | | | HBG1 & HBG2 |
| 2 | 863 | CAUUGAGAUAGUGUGGG | LRF1/ZBTB7A |
| | | | binding site in |
| | | | the promoter of |
| | | | HBG1 & HBG2 |
| 2 | 864 | AGAUAGUGUGGGGAAGG | LRF1/ZBTB7A |
| | | | binding site in |
| | | | the promoter of |
| | | | HBG1 & HBG2 |
| 2 | 865 | CUGGAGCCUGUGAUAAA | BCL11A |
| | | | erythroid |
| | | | enhancer |
| 2 | 866 | GCCUUGUCAAGGCUAUU | BCL11A |
| | | | binding site in |
| | | | the promoter |
| | | | region of HBG1 |
| | | | & HBG2 |
| 2 | 867 | CCUUGUCAAGGCUAUUG | BCL11A |
| | | | binding site in |
| | | | the promoter of |
| | | | HBG1 & HBG2 |
| 2 | 868 | GCCAGCCUUGCCUUGAC | BCL11A |
| | | | binding site in |
| | | | the promoter of |
| | | | HBG1 & HBG2 |
| 2 | 869 | GCAUUGAGAUAGUGUGG | LRF1/ZBTB7A |
| | | | binding site in |
| | | | the promoter of |
| | | | HBG1 & HBG2 |
| 1 | 870 | CCGUUACUGCCCUGUGGGGC | HBB |
| 1 | 871 | CUUCUGACACAACUGUGUUC | HBB |
| 1 | 872 | AGGUUGCUAGUGAACACAGU | HBB |
| 1 | 873 | GGGCAAGGUGAACGUGGAUG | HBB |
| 1 | 874 | ACACAACUGUGUUCACUAGC | HBB |
| 1 | 875 | UUCACUAGCAACCUCAAACA | HBB |
| 1 | 876 | UUUGAGGUUGCUAGUGAACA | HBB |
| 1 | 877 | ACUCCUGAGGAGAAGUCUGC | HBB |
| 1 | 878 | AAGCUAGUCUAGUGCAAGCU | BCL11A Enh |
| 1 | 879 | GUGCAAGCUAACAGUUGCUU | BCL11A Enh |
| 1 | 880 | GCCUCUGAUUAGGGUGGGGG | BCL11A Enh |
| 1 | 881 | AUUAGGGUGGGGGCGUGGGU | BCL11A Enh |
| 1 | 882 | UCACAGGCUCCAGGAAGGGU | BCL11A Enh |
| 1 | 883 | AUAAAAGCAACUGUUAGCUU | BCL11A Enh |
| 1 | 884 | CCCCACCCACGCCCCCACCC | BCL11A Enh |
| 1 | 885 | GCCAGGGACCGUUUCAGACA | pHBG |
| 1 | 886 | UCUGAAACGGUCCCUGGCUA | pHBG |
| 1 | 887 | CCUUGUCAAGGCUAUUGGUC | pHBG |
| 1 | 888 | AAACGGUCCCUGGCUAAACU | pHBG |
| 1 | 889 | GGGAAGGGGCCCCCAAGAGG | pHBG |
| 1 | 890 | AGACUAUUGGUCAAGUUUGC | pHBG |
| 1 | 891 | CAUUGAGAUAGUGUGGGGAA | pHBG |
| 1 | 892 | AAAAAAAUUAAGCAGCAGUA | pHBG |
| 1 | 893 | UCACAGCCCAAGAUAGUUAA | B2M |

[0593] TABLE 8 provides an illustrative intermediary sequence for use in guide nucleic acids that are useful in the compositions, systems and methods described herein.

TABLE 8
Exemplary Intermediary Sequence

| Effector | | |
|---|---|---|
| Protein | SEQ | Intermediary sequence (5′→3′), |
| SEQ ID No. | ID No. | shown as RNA |
| 1 | 257 | ACAGCUUAUUUGGAAGCUGAAAUGUGAGG |
| | | UUUAUAACACUCACAAGAAUCCU |

[0594] TABLE 9 provides exemplary compositions comprising an effector protein described herein and gRNAs.

TABLE 9
Exemplary Compositions of Effector Protein and Guide Nucleic Acids

| | Effector | | | | |
|---|---|---|---|---|---|
| | Protein | PAM | Target | Intermediary | Repeat |
| Comp | SEQ ID | SEQ ID | SEQ ID | SEQ ID | SEQ ID |
| No. | No. | No. | No. | No. | No. |
| 1 | 1 | 19 | 836-858 | | 703 |
| 2 | 1 | 21 | 836-858 | 257 | |
| 3 | 1 | 22 | 836-858 | 257 | |
| 4 | 1 | 23 | 836-858 | 257 | |
| 5 | 1 | 24 | 836-858 | 257 | |
| 6 | 1 | 25 | 836-858 | 257 | |
| 7 | 1 | 26 | 836-858 | 257 | |
| 8 | 1 | 27 | 836-858 | 257 | |
| 9 | 1 | 28 | 836-858 | 257 | |
| 10 | 1 | 29 | 836-858 | 257 | |
| 11 | 1 | 30 | 836-858 | 257 | |
| 12 | 1 | 31 | 836-858 | 257 | |
| 13 | 1 | 32 | 836-858 | 257 | |
| 14 | 1 | 33 | 836-858 | 257 | |
| 15 | 1 | 34 | 836-858 | 257 | |
| 16 | 1 | 35 | 836-858 | 257 | |
| 17 | 1 | 36 | 836-858 | 257 | |
| 18 | 1 | 38 | 836-858 | 257 | |
| 19 | 1 | 39 | 836-858 | 257 | |
| 20 | 1 | 40 | 836-858 | 257 | |
| 21 | 1 | 41 | 836-858 | 257 | |
| 22 | 1 | 42 | 836-858 | 257 | |
| 23 | 1 | 43 | 836-858 | 257 | |
| 24 | 1 | 44 | 836-858 | 257 | |
| 25 | 1 | 45 | 836-858 | 257 | |
| 26 | 1 | 46 | 836-858 | 257 | |
| 27 | 1 | 48 | 836-858 | 257 | |
| 28 | 1 | 49 | 836-858 | 257 | |
| 29 | 1 | 50 | 836-858 | 257 | |
| 30 | 1 | 51 | 836-858 | 257 | |
| 31 | 1 | 52 | 836-858 | 257 | |
| 32 | 1 | 53 | 836-858 | 257 | |
| 33 | 1 | 54 | 836-858 | 257 | |
| 34 | 1 | 55 | 836-858 | 257 | |
| 35 | 1 | 56 | 836-858 | 257 | |
| 36 | 1 | 57 | 836-858 | 257 | |
| 37 | 1 | 58 | 836-858 | 257 | |
| 38 | 1 | 60 | 836-858 | 257 | |
| 39 | 1 | 61 | 836-858 | 257 | |
| 40 | 1 | 62 | 836-858 | 257 | |
| 41 | 1 | 64 | 836-858 | 257 | |
| 42 | 1 | 65 | 836-858 | 257 | |
| 43 | 1 | 67 | 836-858 | 257 | |
| 44 | 1 | 73 | 836-858 | | 703 |
| 45 | 1 | 76 | 836-858 | | 703 |
| 46 | 1 | 76 | 836-858 | 257 | |
| 47 | 1 | 77 | 836-858 | 257 | |
| 48 | 1 | 79 | 836-858 | 257 | |
| 49 | 1 | 72 | 836-858 | 257 | |
| 50 | 1 | 81 | 512 | 257 | |
| 51 | 2 | 82 | 836-858 | | 252 |
| 52 | 2 | 82 | 836-858 | | 252 |
| 53 | 2 | 513 | 836-858 | | 253 |
| 54 | 2 | 513 | 836-858 | | 254 |
| 55 | 569 | 514 | 836-858 | | 783 |
| 56 | 569 | 514 | 836-858 | | 784 |
| 57 | 569 | 515 | 836-858 | | 783 |
| 58 | 569 | 515 | 836-858 | | 784 |
| 59 | 569 | 516 | 836-858 | | 783 |
| 60 | 569 | 516 | 836-858 | | 784 |
| 61 | 569 | 517 | 836-858 | | 783 |
| 62 | 569 | 517 | 836-858 | | 784 |
| 63 | 570 | 518 | 836-858 | | 785 |
| 64 | 570 | 519 | 836-858 | | 785 |
| 65 | 571 | 514 | 836-858 | | 783 |
| 66 | 572 | | 836-858 | | 704 |
| 67 | 573 | 536 or 565 | 836-858 | | 784 |
| 68 | 574 | 516 or 859 | 836-858 | | 784 |
| 69 | 575 | 524 or 540 | 836-858 | | 783 |
| 70 | 576 | | 836-858 | | 786 |
| 71 | 577 | 538 | 836-858 | | 787 |
| 72 | 578 | 514 | 836-858 | | 788 |
| 73 | 578 | 514 | 836-858 | | 784 |
| 74 | 579 | 516 | 836-858 | | 784 |
| 75 | 580 | 515 or 525 | 836-858 | | 789 |
| 76 | 581 | 516 | 836-858 | | 784 |
| 77 | 582 | | 836-858 | | 790 |
| 78 | 583 | 539 | 836-858 | | 788 |
| 79 | 584 | | 836-858 | | 711 |
| 80 | 584 | | 836-858 | | 792 |
| 81 | 585 | 515 or 516 | 836-858 | | 788 |
| 82 | 585 | 515 or 516 | 836-858 | | 784 |
| 83 | 586 | | 836-858 | | 792 |
| 84 | 587 | 515 or 516 | 836-858 | | 784 |
| 85 | 588 | 516 | 836-858 | | 784 |
| 86 | 589 | 515 | 836-858 | | 784 |
| 87 | 590 | 520 | 836-858 | | 793 |
| 88 | 591 | 532 | 836-858 | | 705 |
| 89 | 591 | 532 | 836-858 | | 784 |
| 90 | 592 | 515 or 526 | 836-858 | | 706 |
| 91 | 592 | 515 or 526 | 836-858 | | 784 |
| 92 | 592 | 515 or 526 | 836-858 | | 794 |
| 93 | 592 | 515 or 526 | 836-858 | | 795 |
| 94 | 592 | 515 or 526 | 836-858 | | 796 |
| 95 | 592 | 515 or 526 | 836-858 | | 797 |
| 96 | 592 | 515 or 526 | 836-858 | | 798 |
| 97 | 592 | 515 or 526 | 836-858 | | 799 |
| 98 | 592 | 515 or 526 | 836-858 | | 800 |
| 99 | 592 | 515 or 526 | 836-858 | | 801 |
| 100 | 592 | 515 or 526 | 836-858 | | 802 |
| 101 | 592 | 515 or 526 | 836-858 | | 803 |
| 102 | 592 | 515 or 526 | 836-858 | | 804 |
| 103 | 592 | 515 or 526 | 836-858 | | 805 |
| 104 | 592 | 515 or 526 | 836-858 | | 806 |
| 105 | 592 | 515 or 526 | 836-858 | | 807 |
| 106 | 592 | 515 or 526 | 836-858 | | 808 |
| 107 | 592 | 515 or 526 | 836-858 | | 809 |
| 108 | 592 | 515 or 526 | 836-858 | | 810 |
| 109 | 592 | 515 or 526 | 836-858 | | 811 |
| 110 | 593 | 84 or 562 | 836-858 | | 707 |
| 111 | 593 | 84 or 562 | 836-858 | | 708 |
| 112 | 593 | 84 or 562 | 836-858 | | 712 |
| 113 | 594 | 542, 72, or | 836-858 | | 709 |
| | | 522 | | | |
| 114 | 594 | 542, 72, or | 836-858 | | 709 |
| | | 522 | | | |
| 115 | 595 | 518 | 836-858 | | 710 |
| 116 | 595 | 518 | 836-858 | | 785 |
| 117 | 595 | 518 | 836-858 | | 832 |
| 118 | 596 | 515 | 836-858 | | 711 |
| 119 | 596 | 515 | 836-858 | | 784 |
| 120 | 597 | 552, 560, | 836-858 | | 712 |
| | | or 564 | | | |
| 121 | 597 | 552, 560, | 836-858 | | 712 |
| | | or 564 | | | |
| 122 | 598 | 516 | 836-858 | | 711 |
| 123 | 598 | 516 | 836-858 | | 713 |
| 124 | 598 | 516 | 836-858 | | 784 |
| 125 | 599 | | 836-858 | | 713 |
| 126 | 599 | | 836-858 | | 824 |
| 127 | 600 | 84 or 549 | 836-858 | | 714 |
| 128 | 600 | 84 or 549 | 836-858 | | 715 |
| 129 | 600 | 84 or 549 | 836-858 | | 708 |
| 130 | 600 | 84 or 549 | 836-858 | | 712 |
| 131 | 600 | 84 or 549 | 836-858 | | 739 |
| 132 | 600 | 84 or 549 | 836-858 | | 828 |
| 133 | 601 | 546 or 543 | 836-858 | | 716 |
| 134 | 601 | 546 or 543 | 836-858 | | 715 |
| 135 | 601 | 546 or 543 | 836-858 | | 828 |
| 136 | 601 | 546 or 543 | 836-858 | | 815 |
| 137 | 602 | 84 or 549 | 836-858 | | 717 |
| 138 | 602 | 84 or 549 | 836-858 | | 708 |
| 139 | 602 | 84 or 549 | 836-858 | | 715 |
| 140 | 602 | 84 or 549 | 836-858 | | 712 |
| 141 | 602 | 84 or 549 | 836-858 | | 739 |
| 142 | 602 | 84 or 549 | 836-858 | | 828 |
| 143 | 602 | 84 or 549 | 836-858 | | 831 |
| 144 | 603 | 533 or 77 | 836-858 | | 718 |
| 145 | 603 | 533 or 77 | 836-858 | | 820 |
| 146 | 603 | 533 or 77 | 836-858 | | 826 |
| 147 | 604 | 516 | 836-858 | | 719 |
| 148 | 604 | 516 | 836-858 | | 784 |
| 149 | 605 | 530 | 836-858 | | 720 |
| 150 | 605 | 530 | 836-858 | | 721 |
| 151 | 605 | 530 | 836-858 | | 827 |
| 152 | 606 | 539 | 836-858 | | 722 |
| 153 | 606 | 539 | 836-858 | | 821 |
| 154 | 607 | 84 | 836-858 | | 723 |
| 155 | 607 | 84 | 836-858 | | 712 |
| 156 | 608 | 534 | 836-858 | | 724 |
| 157 | 608 | 534 | 836-858 | | 830 |
| 158 | 609 | 515 | 836-858 | | 725 |
| 159 | 609 | 515 | 836-858 | | 784 |
| 160 | 610 | 516 | 836-858 | | 726 |
| 161 | 610 | 516 | 836-858 | | 784 |
| 162 | 611 | 56 or 516 | 836-858 | | 727 |
| 163 | 611 | 56 or 516 | 836-858 | | 784 |
| 164 | 612 | 515 or 516 | 836-858 | | 728 |
| 165 | 612 | 515 or 516 | 836-858 | | 784 |
| 166 | 613 | 530 | 836-858 | | 729 |
| 167 | 613 | 530 | 836-858 | | 721 |
| 168 | 613 | 530 | 836-858 | | 827 |
| 169 | 614 | 561 or 555 | 836-858 | | 730 |
| 170 | 614 | 561 or 555 | 836-858 | | 715 |
| 171 | 614 | 561 or 555 | 836-858 | | 708 |
| 172 | 614 | 561 or 555 | 836-858 | | 712 |
| 173 | 615 | 527 or 528 | 836-858 | | 731 |
| 174 | 615 | 527 or 528 | 836-858 | | 784 |
| 175 | 616 | 547 | 836-858 | | 732 |
| 176 | 616 | 547 | 836-858 | | 833 |
| 177 | 617 | 84, 552, or | 836-858 | | 733 |
| | | 554 | | | |
| 178 | 617 | 84, 552, or | 836-858 | | 715 |
| | | 554 | | | |
| 179 | 617 | 84, 552, or | 836-858 | | 708 |
| | | 554 | | | |
| 180 | 617 | 84, 552, or | 836-858 | | 712 |
| | | 554 | | | |
| 181 | 617 | 84, 552, or | 836-858 | | 739 |
| | | 554 | | | |
| 182 | 617 | 84, 552, or | 836-858 | | 828 |
| | | 554 | | | |
| 183 | 618 | 530 | 836-858 | | 734 |
| 184 | 618 | 530 | 836-858 | | 827 |
| 185 | 619 | 542, 72, | 836-858 | | 735 |
| | | 556, or | | | |
| | | 558 | | | |
| 186 | 619 | 542, 72, | 836-858 | | 834 |
| | | 556, or | | | |
| | | 558 | | | |
| 187 | 620 | 533, or | 836-858 | | 736 |
| | | 535 | | | |
| 188 | 620 | 533, or | 836-858 | | 835 |
| | | 535 | | | |
| 189 | 621 | | 836-858 | | 713 |
| 190 | 621 | | 836-858 | | 816 |
| 191 | 622 | 516 | 836-858 | | 719 |
| 192 | 622 | 516 | 836-858 | | 784 |
| 193 | 623 | 84 | 836-858 | | 717 |
| 194 | 623 | 84 | 836-858 | | 708 |
| 195 | 623 | 84 | 836-858 | | 715 |
| 196 | 623 | 84 | 836-858 | | 712 |
| 197 | 623 | 84 | 836-858 | | 739 |
| 198 | 623 | 84 | 836-858 | | 828 |
| 199 | 624 | 546 | 836-858 | | 708 |
| 200 | 624 | 546 | 836-858 | | 817 |
| 201 | 624 | 546 | 836-858 | | 825 |
| 202 | 625 | 547, 566, | 836-858 | | 737 |
| | | or 567 | | | |
| 203 | 625 | 547, 566, | 836-858 | | 822 |
| | | or 567 | | | |
| 204 | 626 | 515, or | 836-858 | | 728 |
| | | 525 | | | |
| 205 | 626 | 515, or | 836-858 | | 784 |
| | | 525 | | | |
| 206 | 627 | 546, 543, | 836-858 | | 715 |
| | | or 84 | | | |
| 207 | 627 | 546, 543, | 836-858 | | 828 |
| | | or 84 | | | |
| 208 | 627 | 546, 543, | 836-858 | | 818 |
| | | or 84 | | | |
| 209 | 628 | 542, 72, or | 836-858 | | 738 |
| | | 558 | | | |
| 210 | 628 | 542, 72, or | 836-858 | | 783 |
| | | 558 | | | |
| 211 | 629 | 84, or 550 | 836-858 | | 739 |
| 212 | 629 | 84, or 550 | 836-858 | | 739 |
| 213 | 630 | 529 | 836-858 | | 739 |
| 214 | 630 | 529 | 836-858 | | 741 |
| 215 | 630 | 529 | 836-858 | | 829 |
| 216 | 630 | 529 | 836-858 | | 819 |
| 217 | 631 | 544, 557, | 836-858 | | 742 |
| | | or 539 | | | |
| 218 | 631 | 544, 557, | 836-858 | | 823 |
| | | or 539 | | | |
| 219 | 632 | 564 or 552 | 836-858 | | 743 |
| 220 | 633 | | 836-858 | | 744 |
| 221 | 634 | 551 | 836-858 | | 708 |
| 222 | 634 | 551 | 836-858 | | 745 |
| 223 | 635 | | 836-858 | | 746 |
| 224 | 636 | 553, 560, | 836-858 | | 730 |
| | | 521, or | | | |
| | | 541 | | | |
| 225 | 636 | 553, 560, | 836-858 | | 708 |
| | | 521, or | | | |
| | | 541 | | | |
| 226 | 637 | | 836-858 | | 747 |
| 227 | 638 | | 836-858 | | 748 |
| 228 | 639 | | 836-858 | | 749 |
| 229 | 640 | | 836-858 | | 750 |
| 230 | 641 | 542 or 558 | 836-858 | | 751 |
| 231 | 642 | | 836-858 | | 752 |
| 232 | 643 | 530 | 836-858 | | 753 |
| 233 | 644 | | 836-858 | | 754 |
| 234 | 645 | 523 | 836-858 | | 755 |
| 235 | 646 | 530 | 836-858 | | 747 |
| 236 | 647 | 518 or 519 | 836-858 | | 756 |
| 237 | 648 | | 836-858 | | 718 |
| 238 | 649 | 530 | 836-858 | | 721 |
| 239 | 650 | 529 | 836-858 | | 757 |
| 240 | 651 | 531 | 836-858 | | 758 |
| 241 | 652 | | 836-858 | | 759 |
| 242 | 653 | 552 or 559 | 836-858 | | 760 |
| 243 | 654 | | 836-858 | | 761 |
| 244 | 655 | | 836-858 | | 762 |
| 245 | 657 | 547 | 836-858 | | 763 |
| 246 | 660 | | 836-858 | | 764 |
| 247 | 663 | | 836-858 | | 765 |
| 248 | 664 | 82 | 836-858 | | 766 |
| 249 | 665 | | 836-858 | | 767 |
| 250 | 666 | | 836-858 | | 764 |
| 251 | 667 | 547 | 836-858 | | 254 |
| 252 | 667 | 547 | 836-858 | | 253 |
| 253 | 668 | 82 | 836-858 | | 766 |
| 254 | 669 | | 836-858 | | 768 |
| 255 | 670 | | 836-858 | | 763 |
| 256 | 671 | | 836-858 | | 769 |
| 257 | 672 | 82 | 836-858 | | |
| 258 | 673 | 85 | 836-858 | | 770 |
| 259 | 674 | | 836-858 | | 770 |
| 260 | 675 | | 836-858 | | 771 |
| 261 | 676 | 547 | 836-858 | | 772 |
| 262 | 677 | 547 | 836-858 | | 772 |
| 263 | 678 | 82 | 836-858 | | 773 |
| 264 | 679 | 537 | 836-858 | | 774 |
| 265 | 680 | 82 | 836-858 | | 775 |
| 266 | 681 | 82 | 836-858 | | 776 |
| 267 | 682 | 568 | 836-858 | | 777 |
| 268 | 683 | 82 | 836-858 | | 778 |
| 269 | 684 | 547 | 836-858 | | 779 |
| 270 | 685 | 514 | 836-858 | | 780 |
| 271 | 686 | 545 | 836-858 | | 781 |
| 272 | 687 | 545 | 836-858 | | |
| 273 | 689 | 82 | 836-858 | | |
| 274 | 690 | 548 | 836-858 | | |
| 275 | 691 | 514 | 836-858 | | |
| 276 | 694 | 82 | 836-858 | | |
| 277 | 695 | 545 | 836-858 | | |
| 278 | 696 | 82 | 836-858 | | 782 |

[0595] TABLE 10 provides illustrative target nucleic acid sequences for use with the compositions, systems, and methods of the disclosure.

TABLE 10
Target Nucleic Acid Sequences
Target Nucleic Acid Sequences

ADA, B2M, BCL11A, BLM, BRCA1, BRCA2, BRIP1, CCND2, CCR5, CHD4, CIITA,
CYBB, ERCC4, FANCA, FANCB, FANCC, FANCD1, FANCD2, FANCE, FANCF,
FANCG, FANCI, FANCJ, FANCL, FANCM, FANCN, FANCO, FANCP, FANCQ,
FANCR, FANCS, FANCT, FANCU, FANCV, FANCW, FIX, FVIII, G6PD GAA, GATA1,
GATA2, GATA-4, globin gene, HBA, HBA1, HBA2, HBB, HBD, HBE, HBE1, HBG,
HBG1, HBG2, HBM, HBQ1, HBZ, HOXA9, HOXB13, IDUA, IL2RG, KLF1, LMO2,
MBD3, MYB, PALB2, RAD51, RAD51C, REV7, RFWD3, SLX4, TRAC, UBE2T, XPF,
XRCC2, ZBTB7A

[0596] TABLE 11 provides illustrative target nucleic acid sequences for use with the compositions, systems, and methods of the disclosure.

TABLE 11
EXEMPLARY TARGET NUCLEIC ACID SEQUENCES

| Name | Ensembl Reference Sequence | Seq ID No. |
|---|---|---|
| BCL11A | ENSG00000119866 | 836 |
| PNPLA2 | ENSG00000177666 | 837 |
| CHD4 | ENSG00000111642 | 838 |
| CIITA | ENSG00000179583 | 839 |
| GATA1 | ENSG00000102145 | 840 |
| B2M | ENSG00000166710 | 841 |
| HBA1 | ENSG00000206172 | 842 |
| HBA2 | ENSG00000188536 | 843 |
| HBB | ENSG00000244734 | 844 |
| HBD | ENSG00000223609 | 845 |
| HBE1 | ENSG00000213931 | 846 |
| HBG1 | ENSG00000213934 | 847 |
| HBG2 | ENSG00000196565 | 848 |
| HBM | ENSG00000206177 | 849 |
| HBQ1 | ENSG00000086506 | 850 |
| HBZ | ENSG00000130656 | 851 |
| HOXA9 | ENSG00000078399 | 852 |
| KLF1 | ENSG00000105610 | 853 |
| CCR5 | ENSG00000160791 | 854 |
| MBD3 | ENSG00000071655 | 855 |
| MYB | ENSG00000118513 | 856 |
| TRAC | ENSG00000277734 | 857 |
| ZBTB7A | ENSG00000178951 | 858 |

[0597] TABLE 12 provides illustrative diseases and syndromes for compositions, systems and methods described herein.

TABLE 12
DISEASES AND SYNDROMES
Diseases
acanthocytosis; acute basophilic leukemia; acute erythroid leukemia; acute lymphoblastic
leukemia; acute myeloid leukemia (AML); acute panmyelosis with myelofibrosis
(APMF); acute posthemorrhagic anemia; anaplastic large cell lymphoma; anemia;
angiocentric glioma; aplastic anemia; autoimmune disorder; autoimmune hemolytic
anemia (AIHA); autoimmune lymphoproliferative syndrome; autoimmune polyglandular
syndrome type 1; alpha-thalassemia; β-thalassemia; Blackfan-Diamond anemia; bleeding
disorder (coagulation); blood cancer; T-cell immunodeficiency; chemotherapy; chorea-
acanthocytosis (ChAc); classic hemochromatosis; coagulation conditions; cold
hemagglutinin disease; cutaneous T-cell lymphoma; diffuse large B-cell lymphoma;
disseminated intravascular coagulation; dysphagia; familial hemophagocytic
lymphohistiocytosis; Fanconi disease (Fanconi anemia); folate-deficiency anemia;
follicular lymphoma; genetic blood disease; genetic disease; glaucoma; glucose-6-
phosphate dehydrogenase (G6PD) deficiency; hairy cell leukemia; hematopoietic genetic
disease; hemochromatosis type 3; hemochromatosis type 4; hemoglobinopathy;
hemoglobin disorder; hemoglobin C disease; hemoglobin E disease; hemolytic anemia;
hemolytic uremic syndrome; hemophilia; hemophilia A; hemophilia B; hereditary
elliptocytosis (HE); hemorrhagic conditions; hereditary hemorrhagic telangiectasia;
hereditary hypofibrinogenemia; hereditary intraosseous vascular malformation; hereditary
leiomyomatosis and renal cell cancer; hereditary persistence of fetal hemoglobin;
hereditary pyropoikilocytosis (HPP); hereditary spherocytosis; hereditary stomatocytosis;
hexokinase deficiency; histiocytic sarcoma; hormone refractory prostate cancer; human
immunodeficiency with microcephaly; hyperanaemia; hypochromic anemia;
immunodeficiency; immunodeficiency 13; immunodeficiency 17; immunodeficiency 25;
immunodeficiency with hyper-IgM type 1; immunodeficiency with hyper-IgM type 3;
immunodeficiency with hyper-IgM type 4; immunodeficiency with hyper-IgM type 5;
immunoglobulin alpha deficiency; inborn errors of thyroid metabolism; ineffective
erythropoiesis; iron-deficiency anemia; juvenile hemochromatosis; leukemia; lymphoma;
lymphomatoid granulomatosis; lymphoplasmacytic lymphoma; a lysosomal storage
disease (e.g., Hunter syndrome, Hurler syndrome); lipid storage disease; lipid storage
disease with myopathy; malignant blood disease; malignant immunoproliferative
diseases; mantle cell lymphoma; Marchiafava-Micheli syndrome; megaloblastic anemia
type 1; megaloblastic hereditary anemia; metabolic disorder; microglioma; Minkowski-
Chauffard syndrome; multiple cutaneous and mucosal venous malformations; multiple
myeloma; myelodysplastic syndrome; neuroacanthocytosis (Levine-Critchley syndrome);
non-malignant blood disease; nutritional megaloblastic anemia; paroxysmal cold
hemoglobinuria (PCH); pernicious anemia; persistent fetal hemoglobin; platelet
glycoprotein IV deficiency; pleuropulmonary blastoma and cystic nephroma; plummer-
vinson syndrome (PVS); PRKAG2 cardiac syndrome; primary hemochromatoses;
prostate cancer; protein-deficiency anemia; pyruvate kinase deficiency; reticulosis;
reticuloendotheliosis; severe combined immunodeficiency disorder (SCID); scurvy; sickle
cell anemia; sickle cell disease (SCD); storage diseases; stroke; subependymal glioma; T
Cell deficiency; T-Cell receptor-Alpha/Beta deficiency; thalassemia; thrombocytopenia;
thromboembolism; thrombosis; thrombophilia due to antithrombin III deficiency; thyroid
metabolism diseases; transcobalamin II deficiency (TCII); triosephosphate isomerase
(TPI); vitamin B12 deficiency anemia; Waldenstrom's macroglobulinemia; X-linked
lymphoproliferative disease

### Examples

[0598] The following examples are included for illustrative purposes only and are not intended to limit the scope of the invention.

### Example 1: Indel Activity of Effector Proteins in Eukaryotic Cells

[0599] Effector proteins (e.g., any one of the effector proteins recited in TABLE 1, or a variant thereof as recited in TABLE 2) are tested for their ability to produce indels at the targeted loci (e.g., HBB gene, HBG1 gene, HBG2 gene, BCL11A gene, or B2M gene, or regulatory sequence thereof (e.g., promoter, enhancer)) in eukaryotic cells (e.g., hematopoietic stem cell (HSC), or any other eukaryotic cell) in vitro. Plasmid pairs co-expressing the effector protein and a guide nucleic acid (e.g., guide RNA, sgRNA or crRNA) are delivered to eukaryotic cells via transfection, electroporation, or lipofection using a lipofection reagent. Transfected cells are first incubated with the effector protein and guide nucleic acid and then lysed to obtain the genomic DNA. The genomic DNA is subjected to PCR amplification to amplify the targeted loci. Indels are detected by next generation sequencing (NGS) of PCR amplicons at the targeted loci, and indel percentage is calculated as the fraction of sequencing reads containing insertions or deletions relative to an unedited reference sequence.

### Example 2: Indel Activity of Effector Proteins in Hematopoietic Stem Cells (HSCs)

[0600] Effector proteins (e.g., any one of the effector proteins recited in TABLE 1, or a variant thereof as recited in TABLE 2) are tested for their ability to produce indels at the targeted loci (e.g., HBB gene, HBG1 gene, HBG2 gene, BCL11A gene, or B2M gene, or regulatory sequence thereof (e.g., promoter, enhancer)) in hematopoietic stem cells (HSCs). An mRNA encoding the effector protein and a guide nucleic acid (e.g., guide RNA, sgRNA, crRNA) are delivered to HSCs using a neon electroporation system using a 1500 volts/30 ms/2 pulse protocol. Electroporated HSCs are first incubated at 37° C. in a culture medium and then lysed to obtain the genomic DNA. The genomic DNA is subjected to PCR amplification to amplify the targeted loci. Indels are detected by next generation sequencing (NGS) of PCR amplicons at the targeted loci, and indel percentage is calculated as the fraction of sequencing reads containing insertions or deletions relative to an unedited reference sequence.

### Example 3: Gene Editing of Eukaryotic Cells with AAV Vector Comprising Effector Protein

[0601] An AAV vector is constructed to contain a transgene between its ITRs. Such a transgene, for example, can provide or encode, in a 5′ to 3′ direction, a first promoter (e.g., U6), a guide nucleic acid (e.g., guide RNA, sgRNA, crRNA), a second promoter (e.g., EFS), an effector protein (e.g., any one of the effector proteins recited in TABLE 1, or a variant thereof as recited in TABLE 2), and a poly A signal (e.g., SV40 poly A tail). The AAV vector is expressed with supporting plasmids to produce an adeno-associated virus (AAV). Eukaryotic cells (e.g., hematopoietic stem cell (HSC), or any other eukaryotic cell) are contacted with the AAV for 24 hours. After about 96 hours, post AAV contact, DNA or RNA is isolated from the infected eukaryotic cells. Edits are detected at the targeted loci (e.g., HBB gene, HBG1 gene, HBG2 gene, BCL11A gene, or B2M gene, or regulatory sequence thereof (e.g., promoter, enhancer)) by next generation sequencing (NGS) and/or Q-PCR.

### Example 4: Gene Editing of HSCs with AAV Vector Comprising Effector Protein

[0602] An AAV vector is constructed to contain a transgene between its ITRs. Such a transgene, for example, can provide or encode, in a 5′ to 3′ direction, a first promoter (e.g., U6), a guide nucleic acid (e.g., guide RNA, sgRNA, crRNA), a second promoter (e.g., EFS), an effector protein (e.g., any one of the effector proteins recited in TABLE 1, or a variant thereof as recited in TABLE 2), and a poly A signal (e.g., SV40 poly A tail). Optionally, the AAV vector comprises additional promoters, guide nucleic acids (e.g., guide RNA, sgRNA, crRNA), transcriptional enhancers (e.g., WPRE), or combinations thereof. Additional guide nucleic acids comprise different repeat and/or handle sequences targeting different sequences in a target nucleic acid. The effector protein comprises an amino acid sequence with at least 85% identity to a sequence recited in TABLE 1 and TABLE 2. Additionally, contacting the effector protein-guide nucleic acid complex to the target nucleic acid results in modifying a target sequence (e.g., nuclease activity, nickase activity, base editing activity, cleavage activity, integrase activity, recombinase activity). Optionally, the effector protein can be expressed either ubiquitously or tissue-specifically based on the second promoter the AAV vector is engineered to have. The AAV vector is expressed with supporting plasmids to produce an adeno-associated virus (AAV). HSCs are contacted with the AAV for 24 hours. After about 96 hours, post AAV contact, DNA or RNA is isolated from the infected HSCs. Edits are detected at the targeted loci (e.g., HBB gene, HBG1 gene, HBG2 gene, BCL11A gene, or B2M gene, or regulatory sequence thereof (e.g., promoter, enhancer)) by next generation sequencing (NGS) and/or Q-PCR.

### Example 5: Base Editing with Fusion Protein in Lipofected Eukaryotic Cells

[0603] A nucleic acid vector encoding a polypeptide (e.g., effector protein, effector partner, fusion protein or a combination thereof) is construed for nucleic acid editing. The fusion protein comprises an effector protein or a variant thereof (e.g., TABLE 1 and TABLE 2) fused to an effector partner capable of modifying a target nucleic acid as described herein. Plasmid pairs co-expressing the fusion protein and guide nucleic acid (1 plasmid/target) are delivered to eukaryotic cells (e.g., hematopoietic stem cell (HSC), or any other eukaryotic cell) via lipofection using a lipofection reagent. Lipofected cells are first incubated with the fusion protein and guide nucleic acids (e.g., guide RNA, sgRNA, crRNA), prior to DNA being extracted from the lipofected cells. Editing is detected by next generation sequencing (NGS) of PCR amplicons of the targeted loci (e.g., HBB gene, HBG1 gene, HBG2 gene, BCL11A gene, or B2M gene, or regulatory sequence thereof (e.g., promoter, enhancer)) to assess whether the fusion protein edited the target sequence such that base editing is detected and recorded as a change in 1% base call relative to the negative control.

### Example 6: Gene Editing of Eukaryotic Cells with AAV Vector Comprising Fusion Proteins

[0604] An AAV vector is constructed to contain a transgene between its ITRs. In some embodiments, the transgene providing or encoding, in a 5′ to 3′ direction, a first promoter (e.g., U6), a guide nucleic acid (e.g., guide RNA, sgRNA, crRNA), a second promoter (e.g., EFS), an fusion protein (e.g., effector protein-fusion protein comprises an effector protein or a variant thereof (e.g., TABLE 1 and TABLE 2) fused to an effector partner), and a poly A signal (e.g., SV40 poly A tail). The AAV vector is expressed with supporting plasmids to produce an adeno-associated virus (AAV). Eukaryotic cells (e.g., HSC) are contacted with the AAV for 24 hours. After about 96 hours, post AAV contact, DNA or RNA is isolated from the infected eukaryotic cells. Edits are detected at the targeted loci (e.g., HBB gene, HBG1 gene, HBG2 gene, BCL11A gene, or B2M gene, or regulatory sequence thereof (e.g., promoter, enhancer)) by next generation sequencing (NGS) and/or Q-PCR.

### Example 7: Ex Vivo Editing Activity of L26R Variant of CasPhi.12 in HSCs

[0605] This experiment was performed to determine if variants of CasPhi. 12 (the L26R variant) can modify HSCs. First, the L26R variant of CasPhi.12 effector protein (SEQ ID NO: 2) was engineered and delivered as mRNA into HSCs using a neon electroporation system using various protocols (FIG. 1). The 1500 volts/30 ms/2 pulse protocol was selected.

[0606] mRNA sequences encoding the L26R variant or corresponding WT effector protein (SEQ ID NO: 2) targeting a TTN PAM (SEQ ID NO: 82) were prepared. Guide nucleic acids comprising a repeat sequence (SEQ ID NO: 253) and a spacer sequence (one of SEQ ID NOs: 860-864) as described in TABLE 13 were prepared.

[0607] HSCs were prepared for electroporation with an mRNA encoding an effector protein and a guide nucleic acid. 2×10⁵ HSCs were spun down at 300 g for 10 mins. The cells were washed with PBS and spin down at 300 g for 5 to 10 mins. The cell pellet was resuspended with 10 μl Buffer T. Next, 5 μg or 10 μg of the L26R variant mRNA and 500 pmol synthetic gRNA were mixed. The RNA mixture was added to the HSC cell suspension and delivered using a neon electroporation at 1500 volts, 10 ms and 3 pulses. HSCs were immediately transferred to culture medium and incubated at 37° C.

[0608] Indels were detected by NGS at the targeted loci. Indel percentage was calculated as the fraction of sequencing reads containing insertions or deletions relative to an unedited reference sequence. Results can be seen in FIG. 2. The L26R variant demonstrated increased editing activity compared to the WT effector protein (SEQ ID NO: 2).

TABLE 13
Guide nucleic acid sequences for the L26R
variant targeting HSCs

| | Repeat | Spacer |
|---|---|---|
| | Sequence | Sequences |
| | SEQ ID | SEQ ID |
| Name | No. | No. |
| R7360 | 253 | 860 |
| R7367 | 253 | 861 |
| R7368 | 253 | 862 |
| R8908 | 253 | 863 |
| R8911 | 253 | 864 |

### Example 8: HSCs Editing for SCD & β-Thalassemia

[0609] Hematopoietic stem cells (HSCs), the source of all blood cells, are self-renewing (i.e., able to divide and persist without losing stem cell characteristics) and multipotent (i.e., able to produce all types of blood cells). Only about 1% of hematopoietic stem and progenitor cells (HSPCs), a mixture of stem and progenitor cells, are HSCs. Human HSPC are defined by the surface marker CD34+.

[0610] HSC gene therapy evolved from the bone marrow transplant, a widely-used therapy for malignant and non-malignant blood disease. In HSC gene therapy, donor-derived HSPC are genetically manipulated ex vivo (e.g., using gene editing) prior to infusion of the cells into the intended recipient. HSC gene therapy is clinically-effective for genetic blood disorders including disorders of the β-globin gene (HBB), such as sickle-cell disease (SCD), β-thalassemia, and disorder of other genes. SCD is caused by E6V mutation in the β-globin gene, generating sickle-like, short-lived red blood cells (RBC), leading to the severe blocking of small blood vessels. β-thalassemia is caused by various mutations in β-globin gene, which results in absence of functional RBC. Annually, 300,000 babies are born with SCD, and 60,000 babies are born with β-thalassemia. Several clinical trials are ongoing for HSC gene therapy using different treatment strategies: a treatment of adult and pediatric patients with β-thalassemia was approved by the FDA in 2022; and two FDA approvals in SCD are expected in 2023.

[0611] Strategies targeting the BCL11A erythroid enhancer and HBG1 2 promoters were developed to induce gene correction or fetal hemoglobin (HbF) induction. One such strategy is the substitution of a target sequence of the β-globin encoding gene (e.g., the BS-globin gene or the HBB gene) with a donor nucleic acid. The present strategy may induce homology directed repair (HDR) for the correction of a single mutation, the base conversion of a single mutation, and/or the correction of common clustered mutations for β-thalassemia, all of which can result in the direct correction of the mutation for SCD. Another strategy is to disrupt the BCL11A erythroid enhancer by disrupting (e.g., cleaving) the binding motif of one or more transcriptional factors, such as GATA1, in the BC11A gene to downregulate BCL11A and upregulate γ-globin. Such a strategy may result in large indels and are preferred for disruption of binding motifs of multiple transcriptional activators. An additional strategy is to disrupt the binding motif of the transcription inhibitor of γ-globin gene and/or to base convert the HBG1 2 promoters to create a novel transcriptional activator to downregulate BCL11A.

[0612] This experiment was performed to demonstrate the efficacy and safety of effector protein variants of CasPhi.12 (the L26R variant) to modify and edit HSCs in vitro and in vivo. First, conjugate guide nucleic acids were screened for accurate targeting and cleavage of the γ-globin gene (HBG1 or HBG2) promoter. Guide nucleic acids comprising a repeat sequence (SEQ ID NO: 253) and a spacer sequence (one of SEQ ID NO: 860-869) as set forth in TABLE 14 were prepared. HSPCs were cultured with X-VIVO 15+CC110 for 3 days post-thaw pre-electroporation. Then, 2×10⁵ cells were electroporated with 5 μg mRNA of L26R variant of CasPhi. 12 effector protein (the L26R variant) or CasPhi. 12 WT and 500 pmol guide nucleic acids by Neon system (1500v/10 ms/3pulse). Indels were detected by NGS at the targeted loci(s) 48 hours post-transfection. Indel percentage was calculated as the fraction of sequencing reads containing insertions or deletions relative to an unedited reference sequence. Results can be seen in FIG. 3. The R8911 guide nucleic acid comprising repeat sequence (SEQ ID NO: 253) and spacer sequence (SEQ ID NO: 864) demonstrated the highest indel activity.

TABLE 14
Guide nucleic acid sequences for L26R effector protein
(SEQ ID NO: 2) targeting HSCs

| | | Repeat | Spacer |
|---|---|---|---|
| | | Sequence | Sequences |
| | | SEQ ID | SEQ ID |
| Name | Target Locus | No. | No. |
| R7360 | HBB E6 | 253 | 860 |
| R7367 | BCL11A binding site in the promoter | 253 | 861 |
| | of HBG1 & HBG2 | | |
| R7368 | BCL11A binding site in the promoter | 253 | 862 |
| | of HBG1 & HBG2 | | |
| R8908 | LRF1/ZBTB7A binding site in the | 253 | 863 |
| | promoter of HBG1 & HBG2 | | |
| R8911 | LRF1/ZBTB7A binding site in the | 253 | 864 |
| | promoter of HBG1 & HBG2 | | |
| R7386 | BCL11A erythroid enhancer | 253 | 865 |
| R7369 | BCL11A binding site in the promoter | 253 | 866 |
| | region of HBG1 & HBG2 | | |
| R7371 | BCL11A binding site in the promoter | 253 | 867 |
| | of HBG1 & HBG2 | | |
| R7376 | BCL11A binding site in the promoter | 253 | 868 |
| | of HBG1 & HBG2 | | |
| R8906 | LRF1/ZBTB7A binding site in the | 253 | 869 |
| | promoter of HBG1 & HBG2 | | |

### Example 9: HSPC Editing Optimization

[0613] Next, HSPC editing was optimized using L26R variant of CasPhi.12 effector protein (SEQ ID NO: 2). HSPC were cultured with SFEM II+CC110 for 3 days pre-electroporation. On the day of electroporation, 2×10⁵ cells were electroporated with varied amounts of L26R variant of CasPhi.12 effector protein (SEQ ID NO: 2) mRNA and 500 pmol of R8911 guide nucleic acid comprising repeat sequence (SEQ ID NO: 253) and spacer sequence (SEQ ID NO: 864) by Neon system (1500v/10 ms/3pulse).

[0614] A day post-electroporation, the cells were mixed with CountBright beads for assessment of viability and cell count by manual or flow cytometry. About 2×10⁴ cells were then seeded for cell expansion in SFEMII and erythroid expansion supplement. Four days post-electroporation, the cells were counted again by flow cytometry and lysed for indel measurement by NGS. Proliferation (FIG. 4A) and viability (FIG. 4B) were not affected by L26R variant of CasPhi.12 effector protein (SEQ ID NO: 2) gene editing. DNA was extracted from each sample by QuickExtract for NGS library prep followed by Miseq and demonstrated high indel activity by L26R 4 days post electroporation (FIG. 4C). The totality of the data demonstrates that L26R CasPhi also showed high efficacy and no impact in HSPC viability and proliferation.

### Example 10: In Vivo Editing Activity of L26R CasPhi.12 Variants in HSCs and Engraftment Potential of Edited HSCs

[0615] The following experiments (i.e., 11, 12, 18, 19, 23) were performed, at least in part, to functionally validate HSC editing and persistence of edited HSC in vivo. Successful in vivo HSC engraftment (i.e., successful HSC homing to marrow (BM) niches, HSC survival, and proliferation), would facilitate the development of in vivo HSC targeting protocols (such as tissue processing and CD34+ cells editing efficacy).

### Example 11: Scaled Up HSPC Editing & Full Quality Control Analysis of Frozen HSPCs

[0616] This experiment is performed to demonstrate that frozen commercially available HSPCs can still be successfully edited and retain engraftment potential using of L26R variant of CasPhi.12 effector protein (SEQ ID NO: 2). Briefly, HSPCs are cultured for 3 days post-thaw and 2×10⁶ cells are electroporated with mRNA sequences encoding effector proteins and gRNA by the Neon system. One day after electroporation, cells are frozen in liquid nitrogen. Additionally, fresh cells are counted by flow cytometry, expanded in erythroid expansion medium, and are seeded for a colony formation unit (CFU) assay to establish multi-lineage development potential (e.g., differentiation into megakaryocytes, erythrocytes, macrophages, or neutrophils). Five days after electroporation, cells are counted again by flow cytometry and lysed for indel measurement by NGS. The frozen cells are then thawed to repeat the 1-day post electroporation protocol for quality control analysis.

### Example 12: In Vivo Engraftment of Unedited HSC into NBSGW Mice

[0617] The present assay was performed to establish a baseline of unedited HSC engraftment into NBSGW (NOD.Cg-Kit^{W-41J} Tyr Prkdc^{scid} I12rg^{im1Wjl}/ThomJ) mice which support engraftment of human hematopoietic stem cells without irradiation.

[0618] Briefly, one vial of HSPCs were thawed, spun down and resuspended in DPBS in low (220,000 cells) and high (700,000 cells) dose concentrations. The HSPCs were then injected into NBSGW mice under sterile conditions. Six weeks post injection, retro-orbital bleeding of peripheral blood was collected for RBC lysis and detection of human HSC engraftment by flow cytometry. Ten weeks post injection, BM flush, spleen, and peripheral blood was collected through terminal engraftment analysis of peripheral blood, bone marrow and the spleen, and analyzed for human HSC engraftment by flow cytometry.

[0619] Results demonstrated that all mice were growing or in a healthy weight range (FIG. 5A). For 220,000 cells group dosed (low dose) there is a 88.6% increase and for 700,000 cells group (high dose) there is a 69.6% increase in spleen weight compared to the vehicle group (FIG. 5B).

[0620] At the six-week, halfway analysis of hCD45% in peripheral blood was performed, wherein 100 to 200 μl of blood was lysed by RBC lysis buffer twice. White blood cells were then stained with live/dead zombie Violet dye, mCD45-FITC, and hCD45-APC conjugated antibody for 30 mins before analyzed by flow cytometry. Successful HSC engraftment was demonstrated by human CD45+% in peripheral blood 6 weeks post injection (FIGS. 6A-6B).

[0621] At the 10-week analysis, terminal hCD45% was measured in in peripheral blood, bone marrow, and the spleen. Briefly, 500 to 700 μl of blood was lysed by RBC lysis buffer twice. White blood cells were then stained with live/dead zombie Violet dye, mCD45-FITC, and hCD45-APC conjugated antibody for 30 mins before analyzed by flow cytometry (FIGS. 7A-7B).

[0622] Bone marrow flush were filtered through 70-μm cell strainer and spleen tissue was grinded on the 70-μm cell strainer. Cells filtered through the strainer were lysed with RBC lysis buffer before staining with live/dead zombie Violet dye, mCD45-FITC, and hCD45-APC conjugated antibody for 30 mins. Stained cells were then analyzed by flow cytometry (FIGS. 7C-7D).

[0623] Successful unedited human HSC engraftment in NBSGW mice demonstrated by blood human CD45+% six weeks post injection, as well as blood, bone marrow, and spleen human CD45+% 10 weeks after injection.

[0624] A similar experiment is carried out with HSCs edited by the L26R variant to demonstrate successful edited human HSC engraftment in NBSGW mice.

### Example 13: Homology Directed Repair (HDR) in HSPCs

[0625] HSPCs were cultured with SFEM II+CC110 for 3 days post-thaw pre-EP. 2×10⁵ cells were electroporated with 5 μg of the L26R variant and 500 pmol guide nucleic acid targeting the TRAC locus by Neon system (1500 v/10 ms/3 pulse) followed by transduction of different doses of ssAAV6 (FIG. 8A). One day post electroporation, cells were mixed with CountBright beads for assessment of viability and cell count by flow cytometry or manually. Approximately 2×10⁴ cells were seeded for cell expansion in SFEM II+erythroid expansion supplement. Five days post electroporation, cells were counted again and lysed for indel percentage measurement by NGS. GFP integration is also measured by flow cytometry.

[0626] The results demonstrate that exposure to increasing doses of AAV6 leads to progressive loss of viability (FIG. 8B) and proliferative potential of HSPCs (FIG. 8C). Results also demonstrate that HDR was achieved in HSPCs where about 12% GFP integration was observed with L26R variant using a low down of AAV (FIGS. 8D and 8E). In terms of utilizing an AAV as a vector, overall progressive loss of viability and proliferative potential of HSPC was observed using AAV6 as donor template. The loss of viability and proliferative potential was amplified when combining with electroporation of effector protein mRNA and guide nucleic acids.

### Example 14: HSCs Editing for SCD & β-Thalassemia

[0627] Hematopoietic stem cells (HSCs), the source of all blood cells, are self-renewing (i.e., able to divide and persist without losing stem cell characteristics) and multipotent (i.e., able to produce all types of blood cells). Only about 1% of hematopoietic stem and progenitor cells (HSPCs), a mixture of stem and progenitor cells, are HSCs. Human HSPC are defined by the surface marker CD34+.

[0628] HSC gene therapy evolved from the bone marrow transplant, a widely-used therapy for malignant and non-malignant blood disease. In HSC gene therapy, donor-derived HSPC are genetically manipulated ex vivo (e.g., using gene editing) prior to infusion of the cells into the intended recipient. HSC gene therapy is clinically-effective for genetic blood disorders including disorders of the β-globin gene, such as sickle-cell disease (SCD), β-thalassemia, and disorder of other genes. SCD is caused by E6V mutation in the β-globin gene, generating sickle-like, short-lived red blood cells (RBC), leading to the severe blocking of small blood vessels. β-thalassemia is caused by various mutations in β-globin gene, which results in absence of functional RBC. Annually, 300,000 babies are born carrying SCD, and 60,000 babies are born with β-thalassemia. Several clinical trials are ongoing for HSC gene therapy using different treatment strategies: a treatment of adult and pediatric patients with β-thalassemia was approved by the FDA in 2022; and two FDA approvals in SCD are expected in 2023.

[0629] Three strategies were developed to induce gene correction or fetal hemoglobin (HbF) induction. The first strategy included substitution of a target sequence of the β-globin gene (e.g., the βS-globin gene or the HBB gene) with a donor nucleic acid, inducing homology directed repair (HDR) for the correction of a single mutation, the base conversion of a single mutation, the correction of common clustered mutations for β-thalassemia, or a combination thereof, all of which can result in the direct correction of the mutation for SCD. The second strategy was to disrupt the erythroid enhancer gene (e.g., BCL11A gene) by disrupting (e.g., cleaving) the binding motif of one or more transcriptional factors (e.g., GATA1 gene) for downregulating expression of BCL11A gene and upregulate expression of γ-globin gene. The third strategy was to downregulate BCL11A gene expression by disrupting the binding motif of the transcription inhibitor of γ-globin gene and converting a base within HBG1/2 promoters to create a novel transcriptional activator, or a combination thereof.

[0630] This experiment was performed to demonstrate the efficacy and safety of CasM.265466 effector protein to modify HSPCs in vitro. First, guide nucleic acids comprising a handle sequence having an intermediary sequence, a linker sequence, a repeat sequence as described herein, and a spacer sequence as described in TABLE 15 were screened for accurately targeting the HBB gene, the BCL11A gene (e.g., BCL11A Enh), and the HBG gene (e.g., HBG gene promoter, (pHBG)). A guide nucleic acid targeting the B2M gene (R11617-B2M-PL9192) was used as a positive control, a CasPhi guide nucleic acid (R7378-CasPhi), comprising the nucleotide sequence AUUGCUCCUUACGAGGAGACGAAGCUAGUCUAGUGCA (SEQ ID NO: 894)) was used as a positive control, and no guide nucleic acid was used as a negative control. Briefly, guide nucleic acids comprising an intermediary sequence (e.g., SEQ ID NO: 257), a linker sequence, a repeat sequence (e.g., SEQ ID NO: 251), and a spacer sequence (any one of SEQ ID NO: 870-893) as set forth in TABLE 15 were prepared. HSPCs were cultured with X-VIVO 15+CC110 for 3 days post-thaw pre-electroporation. Then, 2×10⁵ cells were electroporated with 5 μg of mRNA encoding CasM.265466 (SEQ ID NO: 1) or control mRNA and 500 pmol guide nucleic acids by Neon system (1500v/10 ms/3pulse). Indels were detected by NGS at the three targeted loci(s) 48 hours post-transfection. Indel percentage was calculated as the fraction of sequencing reads containing insertions or deletions relative to an unedited reference sequence. Results can be seen in FIG. 9A. FIG. 9B shows representative data for % indel generated by CasM.265466 and R11602-BCL11A Enh-2 guide nucleic acid. The experiment was repeated with a smaller guide nucleic acid group, and the results of 3 and 6 days post-transfection can be seen in FIG. 10.

TABLE 15
Exemplary Guide nucleic acid sequences for CasM.265466
effector protein (SEQ ID NO: 1) for editing HSCs

| | Spacer Sequence | |
|---|---|---|
| | SEQ ID No. | |
| | of Guide Nucleic | |
| Name | Acid Sequence | Target Loci |
| R11593-HBB-1 | 870 | HBB |
| R11594-HBB-2 | 871 | HBB |
| R11595-HBB-3 | 872 | HBB |
| R11596-HBB-4 | 873 | HBB |
| R11597-HBB-5 | 874 | HBB |
| R11598-HBB-6 | 875 | HBB |
| R11599-HBB-7 | 876 | HBB |
| R11600-HBB-8 | 877 | HBB |
| R11601-BCL11A Enh-1 | 878 | BCL11A Enh |
| R11602-BCL11A Enh-2 | 879 | BCL11A Enh |
| R11603-BCL11A Enh-3 | 880 | BCL11A Enh |
| R11604-BCL11A Enh-4 | 881 | BCL11A Enh |
| R11605-BCL11A Enh-5 | 882 | BCL11A Enh |
| R11606-BCL11A Enh-6 | 883 | BCL11A Enh |
| R11607-BCL11A Enh-7 | 884 | BCL11A Enh |
| R11608-pHBG-1 | 885 | pHBG |
| R11609-pHBG-2 | 886 | pHBG |
| R11610-pHBG-3 | 887 | pHBG |
| R11611-pHBG-4 | 888 | pHBG |
| R11612-pHBG-5 | 889 | pHBG |
| R11613-pHBG-6 | 890 | pHBG |
| R11614-pHBG-7 | 891 | pHBG |
| R11615-pHBG-8 | 892 | pHBG |
| R11617-B2M-PL9192 | 893 | B2M |

### Example 15. HSPC Editing Optimization Varying mRNA Encoding Effector Protein Concentration

[0631] HSPC editing was optimized using D220R variant of CasM.265466. HSPCs were cultured with SFEM II+CC110 for 3 days pre-electroporation. On the day of electroporation, 2×10⁵ cells were electroporated with varied amounts of D220R effector protein mRNA and 500 pmol of R11602-BCL11A Enh-2 guide nucleic acid by Neon system (1500v/10 ms/3pulse).

[0632] A day post-electroporation, the cells were mixed with CountBright beads for assessment of viability and cell count by manual or flow cytometry. About 2×10⁴ cells were then seeded for cell expansion in SFEMII and erythroid expansion supplement. Five days post-electroporation, the cells were counted again by flow cytometry and lysed for indel measurement by NGS. Both effector proteins, CasM.265466 and D220R variant, showed similar proliferation (FIG. 11) and viability (FIGS. 12A-12B) profiles.

[0633] DNA was extracted from each sample by QuickExtract for NGS library prep followed by Miseq. Indel activity was assessed 5 days post electroporation. The D220R variant demonstrated higher indel percentage than corresponding wildtype CasM.265466 (FIG. 13). Both effector proteins, CasM.265466 and D220R variant thereof, showed similar indel patterns (FIGS. 14A-14B).

[0634] Using similar methods described herein, HSC editing, proliferation and viability for CasM.265466 was compared to Cas9 from Streptococcus pyogenes (SpCas9). Results are depicted in FIGS. 30A-30C. 6 days post electroporation, the % indels for SpCas9 and CasM.265466 were similar, whereas cells edited with CasM.265466 showed a proliferation rate and viability more similar to unedited control cells.

### Example 16. HSPC Editing Optimization Varying Guide Nucleic Acid Concentration

[0635] A dose titration assay is performed of the guide nucleic acid sequences paired with the CasM.265466 effector protein (SEQ ID NO: 1) to establish dose dependency of the guide nucleic acids.

[0636] HSPCs are cultured with SFEM II+CC110 for 3 days pre-electroporation. On the day of electroporation, 2×10⁵ cells are electroporated with 2 μg of mRNA encoding the effector protein and R11602-BCL11A Enh-2 guide nucleic acid at varying dose in a range from 0 pmol to 1000 pmol by Neon system (1500v/10 ms/3pulse).

[0637] A day post-electroporation, the cells are mixed with CountBright beads for assessment of viability and cell count by manual or flow cytometry. About 2×10⁴ cells are then seeded for cell expansion in SFEMII and erythroid expansion supplement. Five days post-electroporation, the cells are counted again by flow cytometry and lysed for indel measurement by NGS. Proliferation and viability profile of the HSPCs are determined. DNA is extracted from each sample by QuickExtract for NGS library prep followed by Miseq.

### Example 17. In Vivo Editing Activity of Effector Proteins in HSCs and Engraftment Potential of Edited HSCs

[0638] The experiments described herein were performed to functionally validate HSC editing and persistence of edited HSC in vivo. Successful in vivo HSC engraftment (i.e., successful HSC homing to bone marrow (BM) niches, HSC survival, and proliferation) would facilitate the development of in vivo HSC targeting protocols (such as tissue processing and CD34+ cells editing efficacy).

### Example 18. Scaled Up HSPC Editing & Full Quality Control Analysis of Frozen HSPCs

[0639] This experiment is performed to demonstrate that commercially available frozen HSPCs can be successfully edited and retain engraftment potential. Briefly, HSPCs were cultured for 3 days post-thaw and 2×10⁶ cells and were electroporated with mRNA sequences encoding CasM.265466 effector protein (SEQ ID NO: 1) and guide nucleic acids by the Neon system. One day after electroporation, cells were divided in two portions. A first portion of the electroporated cells was frozen in liquid nitrogen. A second portion of the electroporated cells was subjected to flow cytometry, expanded in erythroid expansion medium, and were seeded for a colony formation unit (CFU) assay to establish multi-lineage development potential (e.g., differentiation into megakaryocytes, erythrocytes, macrophages, or neutrophils). Five days after electroporation, the cells from the second portion were counted again by flow cytometry and lysed for indel measurement by NGS. The cells from the first portion were then thawed and treated similar to the cells from the second portion were treated 1-day post electroporation.

[0640] Results show that unedited HSPCs and the CasM.265466 effector protein (SEQ ID NO: 1) edited HSPCs showed similar HSPC viability (FIG. 15), proliferation (FIG. 16), and multi-lineage colony generation (FIG. 17). Furthermore, results show no significant difference in indel percentage between pre-thaw and post-thaw samples (FIG. 18). The totality of the data shows that scaled up editing of HSPCs using the mRNA encoding CasM.265466 effector protein (SEQ ID NO: 1) delivery achieved high proliferation and viability without compromising the editing outcome. Also, no difference was observed between pre-thaw and post-thaw samples in proliferation, viability, InDel %, and multi-lineage development of CasM.265466 effector protein edited HSPCs.

### Example 19. In Vivo Engraftment of Unedited HSC into NBSGW Mice

[0641] The present assay was performed to establish a baseline of unedited HSC engraftment into NBSGW (NOD.Cg-Kit^{W-41J} Tyr Prkdc^{scid} I12rg^{im1Wjl}/ThomJ) mice which support engraftment of human hematopoietic stem cells without irradiation.

[0642] Briefly, one vial of HSPCs were thawed, spun down and resuspended in DPBS in low (220,000 cells) and high (700,000 cells) dose concentrations. The HSPCs were then injected by IV into NBSGW mice under sterile conditions. Six weeks post injection, retro-orbital bleeding of peripheral blood was collected for RBC lysis and detection of human HSC engraftment by flow cytometry. Ten weeks post injection, bone marrow flush, spleen, and peripheral blood were collected and analyzed for human HSC engraftment by flow cytometry.

[0643] Results demonstrated that all mice were growing or in a healthy weight range (FIG. 19A). Mice dosed with 220,000 cells group (low dose) showed 88.6% increase and 700,000 cells group (high dose) showed 69.6% increase in spleen weight compared to the vehicle group (FIG. 19B).

[0644] At the six-week point, an analysis of % hCD45 in peripheral blood, which was collected by Retro-orbital Bleeding, was performed. About 100 to 200 μl of blood was lysed by RBC lysis buffer twice. White blood cells were collected and then stained with live/dead zombie Violet dye, mCD45-FITC, and hCD45-APC conjugated antibody for 30 mins. Stained cells were then analyzed by flow cytometry (FIGS. 20A-20C). The results of FIGS. 20A-20C were used for calculating the presence of % hCD45+, which are summarized in FIG. 20D. An analysis of FIG. 20D indicated successful HSC engraftment in peripheral blood six-weeks post injection.

[0645] Similar analysis was performed 10-weeks post injection, and terminal % hCD45+ was measured in in peripheral blood, bone marrow, and the spleen. Briefly, 500 to 700 μl of blood was lysed by RBC lysis buffer twice. White blood cells were then stained with live/dead zombie Violet dye, mCD45-FITC, and hCD45-APC conjugated antibody for 30 mins. Stained cells were then analyzed by flow cytometry (FIG. 21A-21C).

[0646] Bone marrow flush were filtered through 70-μm cell strainer. Cells filtered through the strainer were lysed with RBC lysis buffer before staining with live/dead zombie Violet dye, mCD45-FITC, and hCD45-APC conjugated antibody for 30 mins. Stained cells were then analyzed by flow cytometry (FIG. 21D-21F).

[0647] Spleen tissue was grinded on the 70-μm cell strainer. Cells filtered through the strainer were lysed with RBC lysis buffer before staining with live/dead zombie Violet dye, mCD45-FITC, and hCD45-APC conjugated antibody for 30 mins. Stained cells were then analyzed by flow cytometry (FIG. 21G-21I).

[0648] The results of FIGS. 21A-21I were used for calculating the presence of % hCD45+, which are summarized in FIG. 21J. An analysis of FIG. 21J indicated successful HSC engraftment 10 weeks post injection in peripheral blood, bone marrow and spleen.

### Example 20. Homology Directed Repair (HDR) in HSPCs

[0649] Frozen HSPCs were thawed and cultured with SFEM II+CC110 for 3 days. 2×10⁵ cells were electroporated with 5 μg of mRNA encoding CasM.265466 effector protein (SEQ ID NO: 1) and 500 pmol guide nucleic acid targeting the TRAC locus by Neon system (1500 v/10 ms/3 pulse). Following the electroporation, the cells were transduced with different doses of ssAAV6, wherein the ssAAV6 comprised a nucleotide sequence encoding GFP (FIG. 22A). One day post electroporation, cells were mixed with CountBright beads for assessment of viability and cell count by flow cytometry or manually. Approximately, 2×10⁴ cells were seeded for cell expansion in SFEM II+erythroid expansion supplement. Five days post electroporation, cells were counted again and lysed for indel percentage measurement by NGS. The results of proliferative potential of HSPCs and viability of HSPCs are summarized in FIG. 22B and FIG. 22C, respectively. An analysis of FIGS. 22B-22C indicated that exposure to lower doses of AAV6 leads to progressive improvement of viability and proliferative potential of HSPCs. GFP integration was also measured by flow cytometry and results were summarized in FIGS. 22D-22E. An analysis of FIG. 22D indicated about 6% GFP integration in TRAC locus was observed in CasM.265466 effector protein edited cells at low doses of AAV6.

### Example 21: HSPCs Cell Proliferation and Variability Assay

[0650] This experiment was performed to demonstrate that frozen commercially available HSPCs can be successfully edited using a D220R variant of CasM.265466 effector protein (SEQ ID NO: 1) or a L26R variant of CasPhi.12 effector protein (SEQ ID NO: 2) and retain engraftment potential. Briefly, frozen HSPCs were thawed and cultured with SFEM II+CC110 for 3 days pre-electroporation. On the day of electroporation, two batches of 2.5×10⁶ HSPCs were electroporated with mRNA sequences encoding effector proteins and gRNA using a neon electroporation system at 1500 volts, 10 ms, and 3 pulses. The first batch of HSPCs were electroporated with 25 μg of mRNA encoding CasM.265466 effector protein (SEQ ID NO: 1) and 6250 pmol R11602 guide nucleic acid targeting the BCL11A locus. The second batch of HSPCs were electroporated with 25 μg of mRNA encoding CasPhi. 12 effector protein (SEQ ID NO: 2) and 6250 pmol R8911 guide nucleic acid targeting the promoter of HBG1 and HBG2). After electroporation, the HSCs were immediately transferred to a culture medium and incubated at 37° C.

[0651] One day after electroporation, each batch of cells were divided in two portions. A first portion of the electroporated cells was frozen in liquid nitrogen. A second portion of the electroporated cells was subjected to flow cytometry. 2×10⁴ HSPCs from the second portion were expanded in SFEM II and erythroid expansion medium. Six days after electroporation, the cells from the second portion were counted again. The results of proliferative potential and viability of HSPCs are summarized in FIG. 23A and FIG. 23B, respectively. The cells from the first portion (e.g., unedited) were thawed and six days after electroporation, genomic DNA was extracted using QuickExtract followed by NGS analysis. The results of NGS are summarized in FIG. 24.

### Example 22: HSPCs Differentiation Assay

[0652] This experiment was performed to demonstrate that frozen commercially available HSPCs can be successfully edited using a D220R variant of CasM.265466 effector protein (SEQ ID NO: 1) and successfully differentiate. Briefly, frozen HSPCs were thawed and cultured with SFEM II+CC110 for 3 days pre-electroporation. On the day of electroporation, about 2.5×10⁶ HSPCs were electroporated with mRNA sequences encoding effector proteins and gRNA using a neon electroporation system at 1500 volts, 10 ms, and 3 pulses. The HSPCs were electroporated with 25 μg of mRNA encoding CasM.265466 effector protein (SEQ ID NO: 1) and 6250 pmol R11602 guide nucleic acid targeting the BCL11A locus. After electroporation, the HSCs were immediately transferred to a culture medium and incubated at 37° C. A day post-electroporation, the HSPCs were counted manually and cryopreserved. Additionally, three different densities (e.g., 75 cells, 75 cells, 150 cells) of HSPCs (e.g., erythroid colony-forming unit (CFU-E) or erythroid burst-forming unit (BFU-E), granulocyte colony-forming unit (CFU-G), megakaryocytic colony-forming unit (CFU-M), granulocyte macrophage colony-forming unit (CFU-GM), granulocyte-erythroid macrophage megakaryocytic colony-forming unit (CFU-GEMM)) were seeded for a colony formation unit (CFU) assay to establish multi-lineage development potential (e.g., differentiation into megakaryocytes, erythrocytes, macrophages, or neutrophils). The three different densities of HSPCs were plated onto methylcellulose gels for Myeloid-lineage differentiation for 14 days before individual colonies were manually counted. The results of the CFU assay of HSPCs are summarized in FIG. 25A and FIG. 25B, respectively.

### Example 23: In Vivo Engraftment of Edited HSC into NBSGW Mice

[0653] The present assay was performed to validate long term (i.e., over 3 months) HSC editing following in vivo engraftment of edited HSC into NBSGW (NOD.Cg-Kit^{W-41J} Tyr⁺ Prkdc^{scid} I12rg^{im1Wjl}/ThomJ).

[0654] Briefly, unedited HSPCs, HSPCs edited using a D220R variant of CasM.265466 effector protein (SEQ ID NO: 1) as described in Example 21, and HSPCs edited using a L26R variant of CasPhi.12 effector protein (SEQ ID NO: 2) as described in Example 21 were thawed, spun down and resuspended in DPBS. Approximately 450,000 unedited HSPCs, 450,000 HSPCs edited using the D220R variant, and 450,000 HSPCs edited using the L26R variant were independently injected into NBSGW mice under sterile conditions. Six weeks post injection, retro-orbital bleeding of peripheral blood was collected for RBC lysis and detection of human HSC engraftment by flow cytometry. Twelve weeks post injection, BM flush, spleen, and peripheral blood was collected through terminal engraftment analysis of peripheral blood, bone marrow and the spleen, and analyzed for human HSC engraftment by flow cytometry.

[0655] Results demonstrated that all mice were growing or in a healthy weight range, as summarized in FIG. 26A. Spleen weight for mice injected with D220R HSPCs increased considerably as compared to spleen weight for uninjected mice, mice injected with unedited HSPCs, and mice injected with L26R HSPCs, as summarized in FIG. 26B.

[0656] At the six-week, halfway analysis of hCD45% in peripheral blood was performed, wherein 100 to 200 μl of blood was lysed by RBC lysis buffer twice. White blood cells were then stained with live/dead zombie Violet dye, mCD45-FITC, and hCD45-APC conjugated antibody for 30 mins before analyzed by flow cytometry. Successful HSC engraftment was demonstrated by % of cells that are human CD45+ in peripheral blood 6 weeks post injection, as summarized in FIG. 27A.

[0657] At the 12-week analysis, terminal hCD45% of total CD45+ was measured in bone marrow, spleen and peripheral blood. Briefly, 500 to 700 μl of blood was lysed by RBC lysis buffer twice. White blood cells were then stained with live/dead zombie Violet dye, mCD45-FITC, and hCD45-APC conjugated antibody for 30 mins before analyzed by flow cytometry. Bone marrow flush were filtered through 70-μm cell strainer and spleen tissue was grinded on the 70-μm cell strainer. Cells filtered through the strainer were lysed with RBC lysis buffer before staining with live/dead zombie Violet dye, mCD45-FITC, and hCD45-APC conjugated antibody for 30 mins. Stained cells were then analyzed by flow cytometry, as summarized in FIG. 27B. Genomic DNA was extracted from bone marrow and white blood cells by QuickExtract for NGS library prep followed by Miseq. The genomic DNA was subjected to PCR amplification to amplify the targeted loci. Indels were detected by NGS of PCR amplicons at the targeted loci, and indel percentage was calculated as the fraction of sequencing reads containing insertions or deletions relative to an unedited reference sequence. Results can be seen in FIG. 28A and FIG. 28B.

[0658] Additionally, ˜150 μl of peripheral blood was collected from all mice 12 weeks post injection and sent out for complete blood count (CBC) test. Results can be seen in FIG. 29. In brief, uninjected mice, mice injected with unedited HSPCs, mice injected with D220R HSPCs, and mice injected with L26R HSPCs all had comparable levels of blood cells.

[0659] Overall, successful unedited human HSC engraftment in NBSGW mice was demonstrated by blood having human CD45+ cells six weeks post injection, as well as blood, bone marrow, and spleen having human CD45+ cells 12 weeks after injection.

[0660] While preferred embodiments of the present disclosure have been shown and described herein, it will be obvious to those skilled in the art that such embodiments are provided by way of example only. Numerous variations, changes, and substitutions will now occur to those skilled in the art without departing from the disclosure. It should be understood that various alternatives to the embodiments of the disclosure described herein can be employed in practicing the disclosure. It is intended that the following claims define the scope of the disclosure and that methods and structures within the scope of these claims and their equivalents be covered thereby.

1-59. (canceled)

60. A system for modifying a target nucleic acid of a hematopoietic stem cell (HSC), the system comprising:
(i) a polypeptide, or a nucleic acid encoding the polypeptide, wherein the polypeptide comprises an amino acid sequence that is at least 95% identical to any one of the amino acid sequences set forth in TABLE 1; and
(ii) an engineered guide nucleic acid, or a nucleic acid encoding the engineered guide nucleic acid, wherein:
a) the engineered guide nucleic acid comprises a first region and a second region,
b) the polypeptide at least partially binds to the first region to form an RNP complex,
c) the second region comprises a nucleotide sequence that is at least 80% complementary or at least 80% reverse complementary to a target sequence of the target nucleic acid,
d) the RNP complex, upon hybridization of the second region to the target nucleic, modifies the target nucleic acid of the HSC,
e) the first region and the second region are heterologous to each other, and
f) the HSC following modification by the RNP complex retains at least one of cell viability, cell proliferation, and multi-lineage development potential relative to an unmodified HSC.

61. The system of claim 60, wherein the target nucleic acid is within a gene of the HSC, and wherein the target nucleic acid comprises a nucleotide sequence of any one of genes set forth in TABLE 10, a variant thereof, a promoter thereof, an enhancer thereof, or a portion thereof.

62. The system of claim 60, wherein the polypeptide has nickase activity or nuclease activity.

63. The system of claim 60, wherein the polypeptide comprises an effector protein, an effector partner, a fusion protein or a combination thereof.

64. The system of claim 63, wherein the effector partner is selected from a polymerase, a deaminase, a reverse transcriptase, a transcriptional repressor, an integrase, a recombinase and a transcriptional activator.

65. The system of claim 64, wherein the effector protein is fused to an effector partner, wherein the effector protein and the effector partner are heterologous to each other.

66. The system of claim 60, wherein the polypeptide recognizes a protospacer adjacent motif (PAM) as set forth in TABLE 4.

67. The system of claim 60, wherein the engineered guide nucleic acid comprises a nucleotide sequence that is at least 85% identical to any one of the nucleotide sequences set forth in TABLE 9.

68. A viral vector that encodes one or more components of the system of claim 60, wherein the viral vector is an adeno associated viral (AAV) vector.

69. A pharmaceutical composition comprising the system of claim 60, and a pharmaceutically acceptable carrier.

70. A method of producing an engineered HSC, the method comprising:
(i) contacting a target nucleic acid of an HSC with the system of claim 60 for a first sufficient period of time to allow for transfection of the HSC; and
(ii) culturing the HSC for a second sufficient period of time for indels to occur in the target nucleic acid for modifying target nucleic acid and, thereby, producing the engineered HSC.

71. The method of claim 70, wherein modifying further comprises inserting a donor nucleic acid into the target nucleic acid.

72. An engineered HSC modified by the method of claim 71.

73. An engineered HSC modified by the system of claim 60.

74. A method of treating a disease or disorder comprising administering the engineered HSC of claim 73 to a subject in need thereof.

75. The method of claim 74, wherein the engineered HSC was previously frozen.

76. The method of claim 74, wherein the engineered HSC engrafts into the bone marrow of the subject.

The application's sequence listing, which the Patent Office published only in electronic form, follows.

SEQUENCE LISTING (909 sequences)

SEQ ID NO: 1 - protein, 448 aa, synthetic construct
MSVLTRKVQLIPVGDKEERDRVYKYLRDGIEAQNRAMNLYMSGLYFAAINEASKEDRKELNQLYSRIATSSKGSAYTTDIEFPTGLASTSTLSMAVRQDFTKSLKDGLMYGRVSLPTYRKDNPLFVDVRFVALRGTKQKYNGLYHEYKSHTEFLDNLYSSDLKVYIKFANDITFQVIFGNPRKSSALRSEFQNIFEEYYKVCQSSIQFSGTKIILNMAMDIPDKEIELDEDVCVGVDLGIAIPAVCALNKNRYSRVSIGSKEDFLRVRTKIRNQRKRLQTNLKSSNGGHGRKKKMKPMDRFRDYEANWVQNYNHYVSRQVVDFAVKNKAKYINLENLEGIRDDVKNEWLLSNWSYYQLQQYITYKAKTYGIEVRKINPYHTSQRCSCCGYEDAGNRPKKEKGQAYFKCLKCGEEMNADFNAARNIAMSTEFQSGKKTKKQKKEQHENK

SEQ ID NO: 2 - protein, 717 aa, synthetic construct
MIKPTVSQFLTPGFKLIRNHSRTAGLKLKNEGEEACKKFVRENEIPKDECPNFQGGPAIANIIAKSREFTEWEIYQSSLAIQEVIFTLPKDKLPEPILKEEWRAQWLSEHGLDTVPYKEAAGLNLIIKNAVNTYKGVQVKVDNKNKNNLAKINRKNEIAKLNGEQEISFEEIKAFDDKGYLLQKPSPNKSIYCYQSVSPKPFITSKYHNVNLPEEYIGYYRKSNEPIVSPYQFDRLRIPIGEPGYVPKWQYTFLSKKENKRRKLSKRIKNVSPILGIICIKKDWCVFDMRGLLRTNHWKKYHKPTDSINDLFDYFTGDPVIDTKANVVRFRYKMENGIVNYKPVREKKGKELLENICDQNGSCKLATVDVGQNNPVAIGLFELKKVNGELTKTLISRHPTPIDFCNKITAYRERYDKLESSIKLDAIKQLTSEQKIEVDNYNNNFTPQNTKQIVCSKLNINPNDLPWDKMISGTHFISEKAQVSNKSEIYFTSTDKGKTKDVMKSDYKWFQDYKPKLSKEVRDALSDIEWRLRRESLEFNKLSKSREQDARQLANWISSMCDVIGIENLVKKNNFFGGSGKREPGWDNFYKPKKENRWWINAIHKALTELSQNKGKRVILLPAMRTSITCPKCKYCDSKNRNGEKFNCLKCGIELNADIDVATENLATVAITAQSMPKPTCERSGDAKKPVRARKAKAPEFHDKLAPSYTVVLREAV

SEQ ID NO: 3 - protein, 15 aa, synthetic construct
PKKKRKVGIHGVPAA

SEQ ID NO: 4 - protein, 16 aa, synthetic construct
KRPAATKKAGQAKKKK

SEQ ID NO: 5-6 - skipped (2 entries)

SEQ ID NO: 7 - protein, 8 aa, synthetic construct
  VARIANT 3: note = Any naturally occurring amino acid
  VARIANT 4: note = W, F, or Y
  VARIANT 5: note = Any naturally occurring amino acid
  VARIANT 6: note = Any naturally occurring amino acid
KRXXXXAF

SEQ ID NO: 8 - skipped

SEQ ID NO: 9 - protein, 6 aa, synthetic construct
  VARIANT 5: note = K or R
  VARIANT 6: note = W, F, or Y
LGKRXX

SEQ ID NO: 10 - skipped

SEQ ID NO: 11 - protein, 20 aa, synthetic construct
  VARIANT 4: note = Any naturally occurring amino acid
  VARIANT 8: note = Any naturally occurring amino acid
  VARIANT 11: note = Any naturally occurring amino acid
  VARIANT 15: note = Any naturally occurring amino acid
  VARIANT 19: note = Any naturally occurring amino acid
GLFXALLXLLXSLWXLLLXA

SEQ ID NO: 12-17 - skipped (6 entries)

SEQ ID NO: 18 - protein, 16 aa, synthetic construct
APKKKRKVGIHGVPAA

SEQ ID NO: 19-250 - skipped (232 entries)

SEQ ID NO: 251 - RNA, 13 nt, synthetic construct
  source 1..13: mol_type = other RNA
aaggatgccaaac

SEQ ID NO: 252 - RNA, 24 nt, synthetic construct
  source 1..24: mol_type = other RNA
atagattgctccttacgaggagac

SEQ ID NO: 253 - RNA, 20 nt, synthetic construct
  source 1..20: mol_type = other RNA
attgctccttacgaggagac

SEQ ID NO: 254 - RNA, 36 nt, synthetic construct
  source 1..36: mol_type = other RNA
ctttcaagactaatagattgctccttacgaggagac

SEQ ID NO: 255-256 - skipped (2 entries)

SEQ ID NO: 257 - RNA, 52 nt, synthetic construct
  source 1..52: mol_type = other RNA
acagcttatttggaagctgaaatgtgaggtttataacactcacaagaatcct

SEQ ID NO: 258-568 - skipped (311 entries)

SEQ ID NO: 569 - protein, 483 aa, synthetic construct
LHETEKSLKFAEKYIAMPTITRKIELTLCTEGLSDEQRKEQWGLLYHINDNLYKAANNISSKLYLDEHVSSMVRMKHAEYLSLQKELARAEKQKVDDAIIVELTRKLAVAEKEMTDQELAICKYATEMSTNTLAYNFAKEIETKIFGQILACLENNAHALFVDDSPNVRRGERAIRNYKKGMPIPFPWNRSIKIEADGGEFYLRWYNGLRFLLTFGKDRSNNRLIVKRCMKMDEVFEGEYKLCNSSIQLAKRDGKPKLFLLLVVNIPQEHVELNKNIVVGVDLGVNVPAYVATNITEERKAIGDREHFLNTRMTFQKRYKSLQRLKGTAGGKGRTKKLEPLERLRDAERNWVHTQNHLFSREVVNFAVQARAATINIEDLSGFGKDNDGNADEKKEFVLRNWSYYELQNMITYKASKYGIKVEKIRPDYTSKTCSWCGQQGFREGVTFICENPECKQHGEKIHADYNAARNIANSKDIIKKNE

SEQ ID NO: 570 - protein, 467 aa, synthetic construct
MAETKRLQKVAKFQIVKPVNMSWDELGRMLRDVRYRLSRLANMAVSETYQNLHQRYRLKNQDAPKSLKIGQLSRNLRKILREEGVEEENLSKYSKTCVLPDTITGAFSRYKLSSIDWRKVLTGKISVPNYKTNLSIPIRCDKPHQRRLELTETGEIEADLMICNKPYPRVLLSTRTISDGQRTVLERLVSNKTNFLPGYRHRFFEVKEKKGKWELSVTYDFPKAEATRLHPDIIVGVDLGWSVPLYAAINNGYARIGYRKFEPLAKRIKHLQKQIKGRRFSTQKGGVKDLAQPTARAGHGRKRILKPIEKLEYKIDNAYTTLNHQLSHCVVEFAKNNGAGLIQIENLEGLKDDLSGTFIGQNWRYNQLQNFIKYKADEAGIKVHPVNPCYTSRRCSHCGFIHISFDREYRDKNRKNGKATMFECPKGCKPLNADYNAAKNLATFDIEEKIRLQCKQQSIEYKELPKD

SEQ ID NO: 571 - protein, 468 aa, synthetic construct
MPTITRKIELHFCTEGLSDEKQKEQRQLLYHINDNLYKAANNISSKLYLDEHVSSMVRLKHADYLSLQRELARAEKQKTPDDELITELSRKLSAAEKEMTDQELAICKYATEMATSTLAYNFAKEMETEIFGQILACLENNAHAVFVDDSLSVKRGERAIRNYKKGMPIPFPWNKNIKIETKDCEFYLRWYNGIRFRLHFGKDRSNNRLIVQRCLKLDDNFESEYKLCNSSIQLDKRDGKTKLFLLLVVNIPQEHVELNKNIVVGVDLGLNYPAYVATNSTEERKYIGDRDHFLKIRMQFQSRYKSLQRLKGTAGGKGRAKKLEPLERLRKAERNWVHTQNHLFSRDVVNFAVQTHAATIHMEDLSGFGKDNDGNADEKKEFVLRNWSYYELQSMIEYKAAKYGIKVEKIRPAYTSKTCSWCGQQGDRKSTTFICENPECKHYGESIHADYNAARNIANSKDIVKKNE

SEQ ID NO: 572 - protein, 456 aa, synthetic construct
MYITRKIELHISEPDLEKRKEHWKFLRMIDAELYRAANLIVTNQLFNDYYENRVINKDGTLTHIDSKIRSLYRNKEKNAEEINLLKEKKKELWEQAKKFYDTSKQNVTYQITSRDFPAIPSSIVTALNATIIKTLKQEWNEVKRGSRSLRTYKKGMPIPFNFGTSKQWFEKSGEEIYLNWFGNIQFHLFFGRDKSNNRIIVNRCLTGEYKYADSSIQLKDRKIFLLLVLDIPVSDNTVDENISVGVDLGVTVPAYCALSDGLKRLSIGSKDDLLRVRLQFQNRKRSLQKRLKMVSGGKGREKKLKTFNDLTDKEKRYVTTYNHMISHSVVKFAKDNKAATIKMEMLEGFGEDEKNKFILRNWSYYQLQTMTEYKAKKENIKVVFVDPYHTSQTCSLCGNYEEGQREKQDEFICKNKECKNFNEKVNADYNAAVNIAKSDKIVTSKEECEYFKKEEI

SEQ ID NO: 573 - protein, 468 aa, synthetic construct
MPTITRKIELTLCTDGLSDEERKAQWGLLYHINDNLYKAANNISSKLYLDEHVSSMVRLKHAEYLSLQKELAKAERQKMPDVDVIEELRERLSAAEQEMSDQELAICKYATEMSTNTLAYRFATEIETNIFGQILARLENNAQAVFLTDAPDVKRGERAIRNYKKGMPIPFPWNNSIKIECEGGEFYLRWYSGLRFHFNFGKDRSGNRLIVQRCLKLDKEYDGEYKLCNSSIQMVKRDGSTKFFLLMVVNIPQEYVELNKHIVVGVDLGINVPAYVATNITPERKAIGDREHFLNTRMAFQRRYKSLQRLKTTAGGKGRTKKLEPLERLRQAEHNWVHTQNHLFSREVVNFALQTHAATIHLEDLSGFGKDSDGNADERKEFVLRNWSYYELQNMITYKAAKYGIRVEKIRPAFTSRTCSCCGHEGFREGVTFICENPECQQFGEKVHADYNAARNIANSKDIIKKNE

SEQ ID NO: 574 - protein, 468 aa, synthetic construct
MPTITRKIELTLCTEGLSEEQRKEQWGLLYHINDNLYKAANNISSKLYLDDHVSSMVRMKHAEYLSLLKELARAEKQKTPDADAIAELRKKVAAAEKEMTDQEHAICKYATEMSTETLAYKFATEIETNVFGQILACLKQAAQSNFKNDAKDVKRGERAIRNYKKGMPIPFPWNDSLRIEKDNKDFYLRWYNGLRFLFNFGKDRSNNRLIVERCLKMDADYDGEYKLCNSSIQIAKREGKVKLFLLLVVSIPQEHVELNKKVVVGVDLGINVPAYVATNITEERKAIGDREHFLNTRMAFQRRYKSLQRLKGTAGGKGRTKKLEPLERLRKAEHNWVHTQNHLFSREVVDFAVKTHAATIHMEDLSGFGKDNDGNADERKEFVLRNWSFYELQNMITYKAAKYGIKVEKIRPAYTSKTCSCCGRQGFRSGVTFICENPECKQYGEKVHADYNAARNIANSKEIIKKNE

SEQ ID NO: 575 - protein, 471 aa, synthetic construct
MPTITRKIKLELCTKGLSEEERKAQWNLLYHINDNLYRSANNISSKLYLDEHVSSLVWLKHKEHQTLKADLAKAKKQKIQDEKTIAELESRLKSCESEMSDQELAICKYTDEMSSKTLSYKFATELELNIYAQILTQVQSKVYADFQNDQKDVRDGKRAIRTYKKGMPIPFPWRNNIRMEPVKKGREYEFYIKWYNDIRFQLIFGKDRSNNRLILQRCFKLDENCVEDYQMRTSSIKMVKGANGTELFLYLVVDIPQEKHILNNKIVVGVDLGINVPAYVATNVTDDRKAIGDREHFLNTRMAISKRFHSFQRLKGTTGGRGKTKKLEPLERLKEKERNWVHTQNHLFSRDVITFALHVKAATIQMEDLSGYGKDDEGNVVEEKKFLLGKWSYYELQEMIKYKAKKVGMRVNFIKPAYSSQTCSWCGERGERNSTSFVCTNSECSHYGEDLHADYNAARNIARSKNIIRYE

SEQ ID NO: 576 - protein, 377 aa, synthetic construct
MIITRKIQILFAAQGEEFKKDKDTLYKWSNIVHHASNIVASNKYVCDHLQGMVYLTEEGKEAVSELSQKVDDIFNTSRMNTTYRMISSLYKGEIPTDILSCVNMQVSKLYNKERKKMADGDRSLRSYRSNIPIPFSANSLMRKWKYADKEYSFDLFGIPFKVVLGKDKSNNRSILERLMDGTYKAATSSIKIQNCEDETGKKTRKFFLLLCVEIPDKSYAGREDNILFAELSIDHPLLVSFPIKKEESKPIPIGNKQSYLYKRLQIQKGLDSCKASCKWNKGGRGRKRKMKSTERFKAKEHNFVDAYMHQISAALIKFAIKHDIGKLCLVDVDKKIKEAKESPFVLRNWSYYSLLTKIQYKAKMNGITVVMVDKNVL

SEQ ID NO: 577 - protein, 478 aa, synthetic construct
MPTITRKIELRLCTEGLSDEERKAQWMLLYHINDNLYRSANNISSKLYLDEHVSSMVRLKHAEYQSTAAELLKAKKNNADEGTISTLEDKVETLKTEMSAQGIAICNYATEMATRTLAGKFASELELNIYGQILAEVKNVVHTNFTNDAKEVREGKRSIRTYKKGMPIPFPWNKSIKIEPVKASSQNEGQDDYEFYLKWYNGLKFILHFGKDRSNNRQILKRCFGLDNLCNERYQMRTSSIQMKKGSNGMELYLLLVLSIPKEQHSLNKKVVVGVDLGINVPAYVATNCTEERRAIGDREQFLNTRMAIIRRKHSFQRLKGTAGGRGRKKKLDPLERLRETERNWVHTQNHLYSRDIIKFALETKAATIQMEKLKGFGRDDNGNVIEEKKFLLGKWSYYELQNMIKYKAGKVGIKVNFIAPAYTSQTCSCCGVRDDRNRKSTSFICHNPDCQMYGKEIHADYNAARNIARSKNVIKDE

SEQ ID NO: 578 - protein, 468 aa, synthetic construct
MPAITRKIELTLCTEGLSEEQRKEQWGLLYHINDNLYKAANNISSKLYLDEHVSSMVRMKHADYLSLLKELARAEKQKTPDDELIAELREKLSLAEQEMTDQELAICNYATEMATSTLAYNFAKEIETEIFGQILACLENNAHAVFVDDSPTVRRGERAIRNYKKGMPIPFPWNKSIRIVEKDGEFYLRWYNGMRFLLTFGKDRSNNRIIMKRCLKMDQDFEGEYKLCNSSIQMVKREGKTKLFLLIVVNIPQEHVELNKNIVVGVDLGVNVPAYVATNITEERKAIGDREHFLNTRMQFQRRYKSLQRLKGTAGGKGRTKKLEPLERLRKAEHNWVHTQNHLFSREVVNFAVQTRAATIHMEDLSGFGKDNDGNADEQKEFVLRNWSFYELQNMIAYKAAKYGIKVEKVKPAYTSKTCSWCGQLGFRQGVTFICENPACKQCGEKVHADYNAARNIANSKDIIKKNE

SEQ ID NO: 579 - protein, 469 aa, synthetic construct
MPTITRKIELTLCTEGLSDQERKDQWNLLYHINDNLYRAANNISSKLYLDDHVGSMVRLKHAEYLSLLRALEKAKKQKAPDEEVIAELSQQVATAEQEMDEQAKAICQYATEMSTQTLSYRFATELETNIFGQILTCLRQGVFSTFNSDARDVKRGERSIRTYKKGMPIPFPWNDSLRIGFEDGEFYLRWYNGLRFRFDFGKDRSNNRLIVQRCMKMDKDYEGDYKLCNSSIQMVKREGKPKFFLLLVVNIPQERVELNKNIVVGVDLGINAPAYVATNTTPERKQIGDREHFLNERMAFQRRFKSLQRLKSTTGGRGRAKKLEPLERLRKAEQNWVHTQNHLFSREVIDFAVKARAATIHMEDLSGFGKDRDGNADERKEFVLRNWSYYELQNMITYKAAKYGIKVEKIRPAYTSKTCSWCGHQGFREGITFICENPECKKFGEKEHADYNAARNIANSKEIIKNNEE

SEQ ID NO: 580 - protein, 469 aa, synthetic construct
MPTITRKIELSLCTDGLSDEQLKEQRQLLYHINDNLYRAANNVSSKLYLDEHVSSMVRLKHADYLSLLRDLARAEKQKSPDEALISELRSKLAAAQREMTEQELAICRYATEMSTQSLSYRFVTEMETHIFAKILDCLKQGVYATFNSDARDVKRGERSIRNYKKGMPIPFAWSDSVRIEQEADEFYLRWYNGIRFRLVFGKDRSNNRLIVKRCLKLDKDYEGDYKLCNSSVQMVKREGKPKTFLLLVVKIPQEQVELNKKIVLGVDLGINYPVYAATNCTEERIYFGEREHFLNTRMQFQRRYKSLQRLKGTTGGKGRKKKLEPLERLRKAERNWVHTQNHLFSQKTVDFALQTHAATIHLEDLSGFGRDSDGSAEEKKEFVLRNWSYYELQQMITYKAAKYGIKVEKIRPAYTSQTCSWCGQRGFRQGVTFICENPECKKCGEKEQADYNAARNIAKSKDVIKDDDE

SEQ ID NO: 581 - protein, 468 aa, synthetic construct
MPTITRKIELMLCSEGLSDEQRKEQWGLLYHINDNLYKAANNISSKLYLDEHVSSMVRMKHAEYLSLLKELARAEKQQTPDEGLIAELSRKLSAAEKEMADQELAICKYATEMSTQTLSYNFAKEIETNIFGQILTCLRQGVYATFNSDAKDVKRGERAIRNYKKGMPIPFPWNKSLKIEAEGGDFYLRWYNGLRFLLTFGKDRSNNRMIVKRCMKMDEDFEGEYKLCNSSIQLAKRDGKPKLFLLLVVNIPQEHVELNKKIVVGVDLGVNVPAYVATNITEERKAIGDREHFLNTRMAFQRRYKSLQRLKGTAGGKGRTKKLEPLERLRDAERNWVHTQNHLFSREVVNFAVQARAATIHMEDMSGFGKDKDGNADEKKEFVLRNWSFYELQNMIAYKSAKYGIKVVKIRPAYTSKTCSWCGQQGERKSTTFICENPECKHYGESIHADYNAARNIANSNDIVKENE

SEQ ID NO: 582 - protein, 385 aa, synthetic construct
MVITRKIEVFVCESDNDLRRSYYEKLYDIRNIAQEAANRATSMLYAIDNLIPCLDEDSRKLIQYIGAKGTPASRQNAAYTIMSHLYKDRMPGIMDMLSNLAQYVTKNYSEDRKRGMYKNALRSYKCSLPVPYQKKSFKGLRFNWYEDSDGDAHEGCFFSLAGVPLQMRFGRDRSNNRLIVERVISGEYKMCTSSLKFDGKKLFLLLCVDIPKQEANVDPKKTLYAYLGVMNPIICTCDVRAKQEYDSGYKCFEIGTKEEFNYRRRQIQEAVRRCQINNRYSSGGKGRKKKCQAIERWHEKEKNYVDTKLHTYSRMLVDLAVAHKCGTIVLLNQKKREDKAKDDNQNGEPFVLRNWSYYNLKDKIGYKCKLAGIKLVQDKEETEEE

SEQ ID NO: 583 - protein, 483 aa, synthetic construct
MPVITRKIKLNLCTEGLSEDERKAQWKMLYRINDNLYRAANNISSKLYLDEHVSSMVRLKNAEYTSLVSDLMKAKKAEDEAAITDLEAKIESLKSEMTAQEEAICCYATEMATRTLAGKFASELDLDIYGQILAEVKSVVFKNFNSDSKEVREGNRSIRTYKKGMPIPFPWNKTIRLEAVKKELSGKHDEDEYDFYLNWYKSSRTDKKAIRFRLYFGKDKSNNQQIVKRCLHLDSTSSENYQMQTSSIQMKKGPEGAELYLLLVVNIPQEQHALNKKIVVGVDLGINVPAYVATNCTEERKAIGDRDHFLNTRMAFSRRFHSFQRLKGTSGGKGRKKKLEPLERLREKERNWVHTQNHLISRDVINFALQVKAATIQMEDLSGYGKDEEGNVKPENKFLQSKWSYFELQSMIKYKAAKCGIKVNLIAPAYTSQTCSWCGQMGIRESTSFVCQNPECKQYGKDIHADYNAARNIARSNKIVKNE

SEQ ID NO: 584 - protein, 477 aa, synthetic construct
MRISKTLSLRIVRPFYTPEVEAGIKAEKDKREAQGQTRSLDAKFFNELKKKHSEIILSSEFYSLLSEVQRQLTSIYNHAMSNLYHKIIVEGEKTSTSKALSNIGYDECKAIFPSYMALGLRQKIQSNFRRRDLKNFRMAVPTAKSDKFPIPIYRQVDGSKGGFKISENDGKDFIVELPLVDYVAEEVKTAKGRFTKINISKPPKIKNIPVILSTLRRRQSGQWFSDDGTNAEIRRVISGEYKVSWIEIVRRTRFGKHDDWFVNMVIKYDKPEEGLDSKVVGGIDVGVSSPLVCALNNSLDRYFVKSSDIIAFNKRAMARRRTLLRQNKYKRSGHGSKNKLEPITVLTEKNERFKKSIMQRWAKEVAEFFRGKGASVVRMEELSGLKEKDNFFSSYLRMYWNYGQLQQIIENKLKEYGIKVNYVSPKDTSKKCHSCTHINEFFTFEYRQKNNFPLFKCEKCGVECSADYNAAKNMAIA

SEQ ID NO: 585 - protein, 469 aa, synthetic construct
MPTITRKIEMKLCTEGLSDQERKDQWNLLYHINDNLYRAANNISSKLYLDDHVLSMVRLKHAEYLGLLRALEKAKKQKIPDEEVIAELSQKVAAAEQEMDDQAKAICQYATEMSTQSLSYRFATELETGIFTKILDCLKQGVFATFNSDTRDVKRGERSIRTYKKGMPIPFAWNDSLRIELEDGEFYLRWYNGLRFRFDFGKDRSNNRLIVRRCLNMDEDYEGDYKLCNSSIQMVKREGLAKFFLLMVVNIPQEQVELNKKIVVGVDLGINAPAYVATNITSERKQIGDREHFLNERMAFQRRFKSLQRLKGTTGGRGRAKKLEPLERLRKAEQNWVHTQNHLFSREVIDFAVKSRAATIHMEDLSGFGKDRDGNADDKKEFVLRNWSYYELQSMITYKAAKYGIKVEKIRPAYTSKTCSWCGHQGFREGITFICENPECKKYGEKEHADYNAARNIANSIEIVKNNEE

SEQ ID NO: 586 - protein, 472 aa, synthetic construct
VPITKTISLRILRPYYPPEIEAKIKAEKEKRKENGDTGSLNSSYYRELKKEYPSIIINDEFFPLLSEMQRNITSIYNRTISHLYHRLIIKKESISTAKALSEGPYRDFKSTFNSYIALGLRQKVQSNFRKKDLMAFKIALPTAKSDKFPIPIYMQTNFKIKESPDSDFIIELPLVEYIAKETKGKNKMFTKVEILSPPKVKNIPVILSTRRRKESGQWFSDEGTNAEIRRIISGEYKVSWIEIVKRTRFGKHDWFVNMVISFEESQEGLDPDVIGGIDIGVSKPLICAINNSLDRYIVKGDDIIAFNRRALSRRRSLLRRNRLKRSGHGSRNKLEPITVLTEKNERFKKSIMQRWAKEVAEFFKSKRASIVQMEELTGIKEREDFFSKTLRMYWNYGQLQKTVENKLREYGIEVRYASPKDTSRRCHSCGHINDYFTFEFRQQNNFPLFKCMNCGIECSADYNAARNIAIAR

SEQ ID NO: 587 - protein, 1331 aa, synthetic construct
MNRIYQGRVSKVEIPDGKDEWKKLDDGESALWQHHQLFQDDVNYLLAAFAALVPTSCEDDIWKDYQAAIERSWESYTGRQGIWDRPFENACVIVGCKKDASFKEFRRKLNSLTGSKASEKQKFEALKQLFEPATEAAKKLKKHDEPVEESLKGKAKDLFGSTLVNLCAQKTKVTPRDVIAKQRNRASECTKKVNEGERLKWADVFYFKTDTSAAKWSREDAAKNIIQFLDKLLGEVEEKEKDAKTSDQKKKMADLAERLEKQKKPLAAWCNNSKTDLPTTEPTRKGSGGYDLKAAVLFSLQPDLDGFRDAFLLFNQARLKEEFATTEKGDAAYIARMAGGVARPVFPFFCDVWAGKVNDEKIGQGIWPDFEKQAFSEVFTKIGQFIVRGRKFELRLAIADQIIAKIETQKKSDARLQAVERIAEDLADELPDTAVDENGQKRPYGIRERTLKGWRKVRPAWREALKKTPNLTAEDLIKQKNRMQERQREKYGSASLFDRLAKEPEIWNHDDKEDAVETWADYVENLEEKAHLETERLFAPAHATLSPRFFRWSETNNKEHLEASSPDVPFELKADALDLSKKEKSQIKIHFWSPRLWRDGLRGKKENLDKDEPDQNWMPPVLRAFVKARKWPCDKQSFAGASVRLAPRCKENIQLVFEPELHTEILSAKWKENFPFSPAKNKESESVGLFWPRTKEDKVLWFDKGETRCLGVDLGLTNSAAWQILQATNKDATAKAPRLRHRLNPDSEKAAWFAHSITNGIVRVAGEDCWGWRKFAPDEKAKLRAELKKPAGKRNALCRKFLSLNREIEFETATHSFLPELSGSGGRNPTDDETKEAAEFFSTLKTKGFDITDRQPSWGKNLSFPKQNDELLWGLKRVRAQLFRLNRWSEQLGKERDSKPYQSAIEIIGNLRSDDPLIELATLKSEPKRLKSRIAELAGEYLDCFKTLLPRIADRILPWRRGHWSWKPCDNDWHRMELDASKPRPEALLAGQRGISLPRLNQLKDLRQLAQSLNHLCRRKQIKRNETVPEPFEDCRQAMEDAREDRAKKIAHEVFAIALGVELAPPPPDKQERKQTESLHGVYRCLERGPVNFIALENLGGYNPSAKQGRRENRQLSSWLKGRIHKILGELCEMVGMPIVLVNAEYTSRFSAKDHSPGFRAEEVQTDDSRRSFWQRKAKEEPSGWQNEFLCWLNKVPDGKSLLLPKKGGEFFVPLGEGTSLYHADLNAAYRIALRALAHRDRAELLGQTWIEKKPYLVDVAGVFPDSILRNGCAFKTISSSERLWEKVNGDLAMQRCREINLARFASWKIALPQQIISEALPPDEEDDIPM

SEQ ID NO: 588 - protein, 517 aa, synthetic construct
MSEATKTLAYRYRLRLTPAQEDILDRSQEQLRLVWNHLVRSQHKVEHEWRHGRAASIKNELLELSLAKNATGQAIPSARKITEERGVSMEEALRLMRQKFVEKVSAIPLRKKDGSRCLRIARRKMATEYAVTVVNAKFKHYYGLGARMCKVLRDKFQKCSDMWIKGKFRRPRFKRKGESVALQRQVQSNSPFKLKRFSDLSALGGQALKKCEVIIHRPLPDSAEIKQIAVSGRRGQRHLIVMFKAASSDVAKNFPATNRTAGVDPGIKVALTITPLDSPDFGTSDKIEKQPDLARDACFLKRLRRLQRKHDRQRRQNNPECFDEKGRWIKGKRLHNESKNMQRTQSRITAMNTHLAESRRDFYHNAACEILRSFDNVAVGKWRPAQTRQRKPTTPSPKGLGAARRATNRISYDHAISLFISYLKDKAERSVTTKHVQEVSEFGSTRSCPKCGKLTGPVGTEGLAVRDWTCVNCNTTFQRDAASAWQIAKRFKAEVASTSQPAESQDSANSASVLTQV

SEQ ID NO: 589 - protein, 470 aa, synthetic construct
MPTLTRKVELYVVGDKEEVSRVYDYIRLAMNATYKCFNECMTALYIAQVKEDTKEDRKELNHLYSRQTYTKKETAFTNDIVFPEGLALAAYVNRMAQQKFVTSLKNGLMYGCVSLPTFKKDCAVPLHVKFVSLAGEKGTNTGFYHEYADVNDLVNALEYDNSPKVFLRFPNNITFGVVFGNPYRGREQRSVFSKIFLGEYKIQGSSIQINSRGKIILNLSMEVPKKKMEHIEGRVVGVDVGLAIPAMCAINDDDYTRSAIGNIDDFLKVRTQIQSQRRRLQKSLKNTSSGHGRTKKLKPLERIAEKERNFANTYNHMVSKRVVDFAVKNGASQINIEDLSGFAKDKNGKSVEDDNMKRVLSNWSYFELQQQIRYKAEQYDIKVRTVNPAYTSQTCSYCGQIGKRETQSKFVCTNPDCKCHKMYKKDWFNADFNAARNIALSTDYTDDEDGKKTKKKKSAKKKPEKKTEEA

SEQ ID NO: 590 - protein, 500 aa, synthetic construct
MSGASGQITRDNKAQRSGPNKGEMSEDHSSTKRPKRVVKVAKYRIIKPVGEMTWPELGEILRTVRYRVFRLGNLAVSEAYLNFHAFRTGKAEEFKSETIGKLSRRLRDMLISEGVKKEDIDRYSATGAVPDTVAGALGQYKVRGITSPAKWRQVIRGTVSLPTFRNDMAIPVRCDKPAQRRLEKAKSEEVEVDLMICRKPYPRVLIGTADLGGGQQAILERLLDNKDNSSDGYRQRLFEIKQDTQSKKWFLFVTYDFPSSGALPLDPNVAVGVDLGVSVPLYAAINNGHARLGRRQFQALGSRIRSLQTQVDARRRAIQRGGRSDVSQSTARSGHGVRRKLQPTEKLRKRIDRSYSTLNHQLSAAVVEFAKNQGAGTVQMEDLGGLREELTGTFIGARWRYHQLQQFLEYKCDEAGITLNKVNPMYTSRRCSECGFIDKDFDRAFRDRSRSDGRVARFICPECSYEADPDYNAARNIATLDIDKLIRVQCQKQGLKYDAL

SEQ ID NO: 591 - protein, 457 aa, synthetic construct
MPKITRKIELLFDRSGLSEEECKEKWRFIYQINDNLYRVANRLVNQLYLADEIDDILRLSDQEYIALRKKLANKKLDEATRISLEEQMSQVMKRVNERRSAILQRPQQSFAYSVVTDSDTEGLTAKILDVLKQDVLSHYKADTKEVLKGEKSISNYKKGMPIPFAFNDSLRLYKEDGFFYLKWYNGIRFLLNFGRDASNNQLIVERCLGISKDEISYKACSSSIQIKKKGNHSKIFLLLVVDVPVEQYAQKPNMVVGVDLGLNVPIYAASNSTLERKAIGSREAFLNQRGAFQRRFRALQRLQTTKGGRGRLHKLEPLERVREAERNWVRTQNHLFSREVINFAIDVGASTIQMEKLANFGRDAQGEVREDKKYVLRNWSYFELQNLIEYKAKRAGIKVKYINPAFTSQTCSECGQLGERDSIHFKCTNPDCPNCGKDIHADYNGARNIAKSKDYIK

SEQ ID NO: 592 - protein, 468 aa, synthetic construct
MPTITRKIELTLLTEGLSEEQRKEQWGLLYHINDNLYKAANNISSKLYLDDHVSSMVRMKHAEYLSLLKELARAEKQKTPDADAIAELRKKVAAAEKEMTDQEHAICKYATEMSTQSLSYRFATELETNIFAKILDCLKQGVFATFNSDARDVKRGERAIRNYKKGMPIPFAWDKSLRIEKDNKDFYLRWYNGLRFLFNFGKDRSNNRLIVERCLKMDADYDGEYKLCNSSIQIAKREGKTKLFLLLVVKIPQEHVELNKKVVVGVDLGINVPAYVATNITEERKAIGDREHFLNSRMAFQRRYKSLQRLRGTAGGKGRAKKLEPLERLRKAEHNWVHTQNHLFSREVVDFAVKSHAATIHMEDLSGFGKDNDGNADERKEFVLRNWSYYELQNMIAYKAAKYGIKVEKIHPAYTSKTCSWCGQLGFREGVTFICENPECKQCGEKVHADYNAARNIANSKDIIKKNE

SEQ ID NO: 593 - protein, 444 aa, synthetic construct
MSKTVTKTVKIALICEHTNKYGEKVDYKDINKLLWKLQKQTRELKNKTIQLCWEYNNFSCDYYKEHHEYPNMEDILKYKRINGFVENKLKTVNDLYSSNCSTTILSTCNEFQNYRSEFLKGTRSINSYKSDQPLDLHKGAIKLEHDGKDFYVSLKLLKRSAFNAMEFKGSDIRFKLNVKDKDKSTLKILESCYDKIYSISASKMTYDRKAGKWFLLLAYSFTPAKTENLDPEKILGVDLGIKIPICASVYGDLDRLTIEGGKIEEFRRRVEARKRSLQKQGKQCGDGRIGHGTKKRIKPITDIGDKIARFRDTENHIYSRYLIEYAVKKGCGTIQMEKLEGITREKDIFLKNWTYFDLQKKIEYKAKEKGIKVVYIEPAYTSKRCSSCGFIDTDNRLDQAHFKCLKCGFNENADYNASQNIGIKNIDKIIKEEHKSASDKLTSE

SEQ ID NO: 594 - protein, 453 aa, synthetic construct
MSKITRKIEIIPDIDGITHEESNKKCYNTFYKFDRKLYKVANLLVSQLYGLDNLLSLMRLQNDEYVKCQSKLSFKSITDATKEEIKKRMQEIDAELVSMKNDIAPKHPQTYSYRAVTSSEYAKDIPSDILNNLKQDVYQHFNENKKEQIRGERSLATYKKGMPIPFSFEKRHVIICDGDNYYLPWFEDTRFRLNFGRDRSNNRAIIDNCIKTKKYKLCAAAKIQLKERKLFLLITVDIPKAESVPVKGKVMGVDLGVINPAYVAVNDGPERSRIGNGEAFQKQRDVFRRRFRELQRSQLTQGGHGRKHKTKATEILRGKERNWVQTENHRISREIVNLASRWKVETIQMESLKGFGKNQEGEVEYNHKRLLGRWSYFELQKDIEYKAAMAGIAVQYVNPAYTSQTCHVCGQRGNRIERDTFICTNPECTCYNQAQDADMNAAINIAKSKDVIK

SEQ ID NO: 595 - protein, 480 aa, synthetic construct
MKNNVEEKRPDKEKRLTKVATFQIVKPVNMSWSEFGKMLRDVRYRLSRLANMAVSEAYQNLHQRYRLKNQNAPKSVKIGQISRDLRKILLEEGLEEENLSKYSKMCVLPDTITGAFSRYKLSTIDWRKVLTGKISIPNYKANLSIPIRCDKPQQRRLERTETGEIEVDLMICNKPYPRVLLSTRTISDGQRSVLERLVLNNANSLPGYRHRIFEIKEKRNEWYLSVTYDFPKAETTKLHSDIIVGVDLGWSVPLYAAINNGYARIGYKQLKPLGDSIKALQRQTIARRRSIQRGGTQDLAAPTARSGHGIKRILQPIEKLEGKIDNAYKTLNHQLSHCVIEFAKNHGAGVIQIENLKGLAEELSGTFIGQNWRYYQLQEFIKYKAKEAGIIVKEVNPFYTSRRCSECGYIHKDFTFEYRQANRKNGKSTMFECPKKEEKGCKPLNADYNAARNLATSDIEDKIRLQCKEQGIEYKEIKEK

SEQ ID NO: 596 - protein, 468 aa, synthetic construct
MPTITRKIELTLCTDGLSEEQRKEQWGLLYHINDNLYKAANNISSKLYLDDHVSSMVRMKHAEYLSLLKELARAEKQKTPDADAIAELKKKVAATEKEMTDQEHAICKYATEMSTQSLSYRFSTEFETKIFAKILDCLKQGVFATFNSDAKDVKRGERAIRNYKKGMPIPFAWTDSLRIKKDNKDFYLLWYNGLRFLFNFGKDRSNNRLIVERCLKMDADYDGEYKLCNSSIQIAKREGKVKLFLLLVVSIPKEHVELNKKVVVSVDLGINVPAYVATNITEERKAIGDREHFLNSRMAFQRRYKSLQRLKGTTGGKGRTKKLEPLERLRKAEHNWVHTQNHLFSREVVDFAVKTHAATIHMEDLSGFGKDNDGNADERKEFVLRNWSYYELQNMISYKAAKYGIKVEKIRPAYTSKTCSWCGQHGFREGVTFICENPACKQCGEKVHADYNAARNIANSKEIIKKNE

SEQ ID NO: 597 - protein, 442 aa, synthetic construct
VTLLVKVVKIHLISEQFDKAGNRIDYKEVNKILWELQKQTREAKNKTVQLLWEWNNFSSDYVKASGIYPKAKDIFGYSSVHGQANKELRTKLILNSSNLSTTTMDVCKIFNTYKKEVWEGKRSVPSYKSDQPLDLHNDSIKLIYENKEFYVRLGLLNRAGFAKYGFKDGFRFKMQVKDNSTKTILERCFDGIYTIVASKLLYDQKKNRWKLNLSYSFDNKNISELDKEKILGVDVGVSCPLVASVFGDRDRFIIKGGEIEKFRKSVEARRRSMLEQTKYCGDGRIGHGRKKRTEPALNIGDKIARFRDTTNHKYSRALIEYAVKKGCGTIQMEKLTGITSKADRFLKDWTYYDLQTKIENKAKEVGINVVYIAPKYTSQRCSKCGYIHKDNRPNQAKFRCLKCDFESNADYNASQNIGIKNIDKTIKKERKKQKSEAQVNEK

SEQ ID NO: 598 - protein, 466 aa, synthetic construct
MPTITRKIELTLCTDGLSDDLRKDQWQLLYHINDNLYKAANNISSKLYLDEHVASMVRLKHAEYLGLIKELAKARKRADDEAVRDLCSKLAVAEQEMNEQAKAICDYATEMSTQTLSYNFAKEIETNIFGQILTCLRQGVLLNFNSDARDVKRGERAIRNYKKGMPIPFPWNDTIKIVSEGDEFYLRWFSGLRFHLNFGKDRSNNRMIVRRCLKMEQDFDEEYKISNSSIQVAKRDGKQKLFLLLVVQIPQEQVVLNKKIVVGVDLGVNVPAYVATNITEERKAIGDREHFLNTRMQFQRRYKSLQRLKTTEGGRGRAKKLEPLERLRKAEHNWVHTQNHLFSREVVNFALQTQAATINMEDLSGFGKDNDGNADECKEFVLRNWSYYELQNMIVYKASKYGIRVQKIRPAYTSKTCSWCGHMGFREGVTFICENPDCKQFGEKVHADYNAARNIANSKEIIKNDE

SEQ ID NO: 599 - protein, 492 aa, synthetic construct
MAGKKKDKDVINKTLSVRIIRPRYSDDIEKEISDEKAKRKQDGKTGELDRAFFSELKSRNPDIITNDELFPLFTEIQKNLTEIYNKSISLLYMKLIVEEEGGSTASALSAGPYKECKARFNSYISLGLRQKIQSNFRRKELKGFQVSLPTAKSDRFPIPFCHQVENGKGGFKVYETGDDFIFEVPLIKYTATNKKSTSGKNYTKVQLNNPPVPMNVPLLLSTMRRRQTKKGMQWNKDEGTNAELRRVMSGEYKVSYAEIIRRTRFGKHDDWFVNFSIKFKNKTDELNQNVRGGIDIGVSNPLVCAVTNGLDRYIVANNDIMAFNERAMARRRTLLRKNRFKRSGHGAKNKLEPITVLTEKNERFRKSILQRWAREVAEFFKRTSASVVNMEDLSGITEREDFFSTKLRTTWNYRLMQTTIENKLKEYGIAVNYISPKYTSQTCHSCGKRNDYFTFSYRSENNYPPFECKECNKVKCNADFNAAKNIALKVVL

SEQ ID NO: 600 - protein, 439 aa, synthetic construct
VIILTKVVKLYLISEQINKEGQKIDYQRINSILWDLQKQTRDIKNRTVQLCWEWMNFSSDYCKTQEEYPKERDILGYTLEGYVYDYFKTGYDLYTGNISTSSREVCSSFKNVKKEILKGERSILSYKANQPLDLHKKAISLEYDNFNFFVKLKLLNRTGKKKYDITEDINFKIQVNDKSTRTILERCYDKEYKISGSKLIYEKKKKLWRLNLCYSFENSQVETLEKDKILGIDLGIVYPLMASIYGEYDRFSIKGGEIEEFRRRTEARKRSILQQTKYCGDGRIGHGRNKRTQPAYKINDKIARFRDTANHKYSRALIEYAVKKNCGIIQMENLTGISDNTDCFLKDWSYYDLQTKIENKAKEMGIKVVYIKAQYTSQRCSRCGYIDVNNRIRQALFKCQNCGYETNADYNASQNIGMYDIENIIEETLKIQSANVKQS

SEQ ID NO: 601 - protein, 437 aa, synthetic construct
MTKVTKVYLISEQIDKDGNKIDFKKISELLWNLQMQTRDIKNKCVQLCWEWLNFSSDYYKKSEEYPKEKDTLGYTLSGFVYDRIKNGSDLYSSNLSTSSRDTCTAFSNYKKEMLKGERSVLSFKANQPLDIHNKAIKLSYENGNFFVALKMLNRAGKEKYGIKDDLRFRMQVRDKSVRTILERLMNDEYKVSASKLMYDKKKKLWKLNLCYSFDNHVISTLDTEKIMGVDLGVVYPIMASVNGDYARFSIKGGEIEAFRSRVEARRRSLLNQSRYCGDGRIGHGRKKRTEPATQIADKIARFRDTTNHKYSRALIDYAIKNGCGTIQMEKLTGITSSAEHFLKEWSYFDLQTKIESKAKEAGIKVVYINPKFTSQRCNKCGYIHTDNRPVQARFCCQKCGYEENADYNASQNIGTKHIDVIIEETLKMQCEPETPTE

SEQ ID NO: 602 - protein, 428 aa, synthetic construct
MNKVVKLALICEQSDKDNSPVDYKKINEILWELQKQTREIKNKAIQYCWEYNNFSSDYYKKFNEYPKEKDILSYTLVGFVNDKFKTGNDLYSGNCSTTVRNACTEFKNSKKELIKGSRSIINYRSNQPLDIHNKCIRIEFENNCFYTYLKLLNRPAFKKYNFANTEIKFKILVRDNSTKTILERCISNEYEIAASKLLYDQKKKCWFLNLVYAFEIKSNNSLDPNKILGVDLGIHYPICASVYGSLDRFTIDGGEIDEFRRRVESRKISMLKQGKNCGDGRIGHGIKARNKPVYNIEDKIARFRDTANHKYSRALIEYAVKHTCGTIQMEDLTGITDIANRFLKNWSYYDLQTKIEYKAKEAGINIVYIDPKNTSRRCSKCGYIDKENRETQSRFICLKCGFKENADYNASQNIGIKDIDKLIKEDVH

SEQ ID NO: 603 - protein, 432 aa, synthetic construct
MAKGTITKVMKYELRYLGGFSDFHEMQKEVWQLQRQYREILNKTIQIALHWDYVSAQQFGESGTYLDIREETGYKTLDGYIYNCLKGAYSEMASANLNAAVQKAWKKYKNSKTQVLQGVMSLPSYKSDQPILIDKGNVKLSAEENNGRAVLTLFSRNYRDTRGLKGNVEFSVLLHDGTQKSIFRNLIDKTYALGQCQLVYERKKWFLLLTYSFTPAGHALDPEKILGVDLGECYALYASSCYAPGILKIEGGEIAEYALRLEKRKRSLQQQARYCGEGRIGHGTKTRVGVVYKAEDRIASFRETINHRYSKELVDYAVSNGYGTIQMEDLSAIQKDLGFPKRLRHWTYYDLQMKITNKAKEHGIAVVKIDPRYTSQRCSKCGHIDPANRPRQEEFCCTACGYACNADYNASQNISIKGIEKIIQKMLSAKAD

SEQ ID NO: 604 - protein, 469 aa, synthetic construct
MPTITRKIELTLCTEGLSDQERKDQWNLLYHINDNLYRAANNISSKLYLDDHVGSMVRLKHAEYLSLLRALEKAKKQKAPDEEVIAELSQQVATAEQEMDEQAKAICQYATEMSTQTLSYRFATELETNIFGQILTCLRQGVFSTFNSDARDVKRGERSIRTYKKGMPIPFPWNDSLRIGFEDGEFYLRWYNGLRFRFDFGKDRSNNCLIVQRCMKMDKDYEGDYKLCNSSIQMVKREGKPKFFLLLVVNIPQERVELNKNIVVGVDLGINAPAYVATNTTPERKQIGDREHFLNERMAFQRRFKSLQRLKGTTGGRGRAKKLEPLERLRKAEQNWVHTQNHLFSREVIDFAVKARAATIHMEDLSGFGKDNDGNADERKEFVLRNWSYYELQNMITYKAAKYGIKVEKIRPAYTSKTCSWCGHQGFREGITFICENPECKKFGEKEHADYNAARNIANSKEIIKNNEE

SEQ ID NO: 605 - protein, 475 aa, synthetic construct
MPERPKTVNKVIWFQIHKPAGDMTWKELGNLLREARYRVFRLANLAVSEKYLSFHMWRTGQEYKSETIGKLNRRLREMLIEEGVEEESQKRFSATGALPDTVVSTLAKGKLAAITSKSKWKDVVNGKTSLPTFKLNMAIPVRCDKAEQRRLRRTESGDVELELMICKQPYPRVVLKTGKLKSGQRAILDRLVENNDNSKEGYSQRVFEIKQVENNDGSKEWRLYISYTFPKKAVEANADVAVGVDIGFSVPLVAAVNNGLERLGYNDFRALNERIRSLQRQVLVRRRSMQSGGRDYVSTPTARSGHGRKRKLLPIQTLRKRWDNAYTTLNHQLSHAVVSFAENHGAATIQIENVKSLKDELRGTFLGQRWRYFELQQFLKYKADEVGIELREVNARYTSRRCSECGYINMAFTRQARDKGRVDGKPMEFVCPECGYKAHPDYNAARNIAMLDIEQKMQVQCKQQGITYADDSEVL

SEQ ID NO: 606 - protein, 483 aa, synthetic construct
MPTITRKIRLHLCTDGLSEEERKAQWKMLYRINDNLYRAANNISSKLYLDEHISSMVRLKHAEYTSLKTELLKAKKADDEETVAELEARINVLNAELSAQEEAICSYATEMATRTLAGKFASELDLNIYGQILAEVKSVVFKNFNSDSKDVREGKRSIRTYKKGMPIPFPWNKTIRLEAVKKESSSKHDEDEYEVYLNWYKSSRTEKKAIRFRLDFGKDKSNNQQIVKRCLNLDNTSSESYQLQTSSIQMKKGSEGAELYLLLVVNIPQDQHVLNKKIVVGVDLGINVPAYVATNCTEERKSIGDREHFLNARIAFHRRFHSFQKLKGTTGGRGRKKKLEPLERLREKERNWVHTQNHLISRDVINFALQTKAATIQMEDLSGYGKDEEGNVKPENKFLQSRWSYFELQSMIKYKAAKCGIKVNLINPSYTSQTCSWCGQMGVRESTSFVCQNPECKKYGKDIHADYNAARNIARSNKTVKNE

SEQ ID NO: 607 - protein, 428 aa, synthetic construct
MNKVVKLALICEQSDKNNSPVDYKKVNEILWELQKQTREIKNKTIQYCWEYYNFSSDYYKKFNKYPKEKDILSYTLWGFINDKFKTGNDLYSGNCSATTKKVIKEFKNSKKELIRGSRSIINYKSNQPLNIHNKCIHLQFKNNNFYVSINLLNRRSFKKYNFANTAIKFKILVRDNSTKAILERCISNEYKISESQLIYNKKKKCWFLNLSYAFEIKSNNSLDPNKILGVDLGIHYPICASVYGSLDRFTIDGGEIDEFRRRVESRKISMLKQGKNCGDGRIGHGIKARNKPVYNIEDKIARFRDTANHKYSRALIEYAVKNNCGTIQMEDLTGITDNANRFLKNWSYYDLQTKIEYKAKEASINVVYINPENTSRRCSKCGYIDKENRKTQSSFICLKCGFKENADYNASQNISIKDIDKLIKEDVH

SEQ ID NO: 608 - protein, 435 aa, synthetic construct
MSKGMLTKVMKYTLRYVGGCGDFHEMQSILWELQKQTRAVLNKTIQIAFEWDYRSREAFQETGEYLDVHAETGYKRLDGYIYNCLKNEYADFAGKNLNAAIQTAWKKYNQSKRDIQTGKMSLPSYRSNQPLIIHNDNVMISQDMQAAPSVRFTLLSLEYKKAHDLNTNPTFEVLINDGTQRAIFEKVRSGEYKLGQCMIQYDKKKWFLLLTYSFQPEKLTLDKNKILGVDLGETIVICASSVSERGRFVIDGGEITRFATQIEARKRSQQHQAAYCGEGRIGHGTKTRVDAVYKTEDRIANFRDTINHRYSRALVNYAVKHGFGTIQMEDLSGIKSSDDFPKFLRHWTYYDLQSKIESKAKERGIAVVKVNPRFTSRRCSKCGYIDEGNRKDQAHFCCLSCGFRANADFNASQNLSIKGIDKIIEKEYNANSKQT

SEQ ID NO: 609 - protein, 468 aa, synthetic construct
MPTITRKIELTLLTEGLSEEQRKEQWGLLYHINDNLYKAANNISSKLYLDDHVSTMVRMKHAEYLSLLRELARAEKQKKPDVDAIAELREKVTAAEKEMSDQERAICTYATEMSTQSLSYRFATEIETNIFAKILDCLKQGVFATFNSDARDVKRGERAIRNYKKGMPIPFAWDKSLRIEKDNKDFYLRWYNGLRFLFNFGKDRSNNRLIVERCLKMDADYDGEYKLCNSSIQIVKREGKVKLFLLLVVSIPQEHVELNKKIVVGVDLGINVPAYVATNITEERKAIGDREHFLNSRMAFQRRYKSLQRLKGTAGGKGRTKKLEPLERLRKAEHNWVHTQNHLFSREVVDFAVKSHAATIHMEDLSGFGKDNDGNADERKEFVLRNWSYYELQNMIAYKAAKYGIKVERIRPAYTSKTCSWCGQLGFREGVTFICENPECKQCGEKVHADYNAARNIANSKDIIKKNE

SEQ ID NO: 610 - protein, 468 aa, synthetic construct
MPTITRKIELTLCTEGLSDEQRKEQWGLLYHINDNLYKAANNISSKLYLDEHVSSMVRMKHAEYLSLLKELARAEKQQTPDEGLIAELSRKLSAAEKEMADQELAICKYATEMSTQTLSYNFAKEIETNIFGQILTCLRQGVYATFNSDAKDVKRGERAIRNYKKGMPIPFPWNNSLKIESDSGEFYLRWYNGLRFLLTFGKDRSNNRMIVNRCMKMDEDFEGEYKLCNSSIQLAKRDGKPKLFLLLVVNIPQEHVKLNKKIVVGVDLGVNVPAYVATNITEERKAIGDREHFLNTRMAFQRRYKSLQRLKGTAGGKGRTKKLEPLERLRDAERNWVHTQNHLFSREVVNFAVQARAATIHMEDLSGFGKDKDGNADEKKEFVLRNWSFYELQNMIAYKSAKYGIKVVKIRPAYTSKTCSWCGQQGDRKSTTFICENPKCKHYGESIHADYNAARNIANSNDIVKENE

SEQ ID NO: 611 - protein, 467 aa, synthetic construct
MPKITRKIEMTLCTEGLSDEQRKEQWGLLYHINDNLYKAANNISTKLYLDEHVSSMVRMKHADYLSLLKELAKAEKKSPDEDLIAELREKLAAAEQEMTDQELAICKYATEMSTQTLAYKFATEIEINVFGQILACLKQAAQSNFKSDAKDVKRGERAIRNYKKGMPIPFPWNDNIRIDADGDEFYLRWYNGLRFHLTFGKDKSNNRMIVKRCLKMDKDFEGEYKLCNSSIQMVKRDGKPKLFLLLVVNIPQEHVELNKNVVVGVDLGVNVPAYVATNITEERKAIGEREHFLNTRMQIQRRYKSLQRLKATAGGKGRTKKLEPLERLRKAEHNWVHTQNHLFSREVVNFAVQTHAATIHMEDLSGFGKDDDGNADEQKEFVLRNWSFYELQNMIAYKAAKYGIKVEKVKPAYTSKTCSWCGQLGFRQGVTFICENPACKQCGEKVHADYNAARNIANSKDIIKKNE

SEQ ID NO: 612 - protein, 469 aa, synthetic construct
MPTITRKIELHLCTDGLTDEQQKAQRLLLYHINDNLYKAANNVSSKLYLDEHVSSMVRLKHDEYLSLSRELARAEKKHDDELTTELRGKLAAAEREMTDQELAICKYATEMSTQSLSYRLVTELETKIFAKILDCLKQGVYATFNSDARDVKRGERAIRNYKKGMPIPFAWNDSVRIEYDEKEKDFYLRWYNDIRFKFHFGRDRSNNRLIVSRCLKLDKDYEGDYQLCNSSIQIVKRDGSTKFFLLLVVKIPQEHVELNKRIVVGVDLGINYPAYVATNCTEERMYIGDREHFLNTRMQFQRRYKSLQKLKGTAGGKGRSKKLEPLERLRNAERNWVHTQNHLFSLKVVNFAVQTHAATIHLEDLSGFGKDDDGNADERKEFVLRNWSYYELQSMIEYKAKKYGIKVEKIRPAYTSQTCSWCGQRGFRQGVTFICENPECKKCGEKENADYNAARNIANSKDVIKDKNE

SEQ ID NO: 613 - protein, 500 aa, synthetic construct
MTERHDNESSKIKAEVSLLNSSVPDFEKKRHVKVLKLHILKPAGDMKWDELGALLRDARYRVFRLANLAISEAYLDFHKWRSGGNEQPKLKISQLNRNLRSMLEDEVTGKQTKMIKSDRYSKSGALPDSIVSPLSMYKLGGLTSKSKWSEVLRGKSSLPTFKLNMAIPVRCDKPGDRRIERTKNGDAEVELRICLQPYPRVIIATGRNSLGDGQRAILDRLLDNTKYSEQGYRQRCFEIKEDQRSGKWHLFVTYDFPAIEPAKNLSRERIVGVDLGAACPLYAAINTGHARLGWKHFSPLAARVRALQNQTIRRRRQILRGGKVSLSEDSARSGHGRKRKLKPISKLEGKIDRAYTTLNHQLSATVIKFAKDNGAGVVQMEDLKGLRETLTGTFLGERWRYEELQRFIRYKADEAGIEIRLVNPQYTSRRCSECGHIHKDFTREFRDKSREGNKSVRFLCPDCGFTADPDYNAARNLASLDIAAIIERQLEIQGLRKHDP

SEQ ID NO: 614 - protein, 443 aa, synthetic construct
VTLLVKVVKIHLISEQFDKAGNRIDYEEVNKILWELQKQTREAKNKTVQLLWEWNNFSSDYVKASGIYPKAKDIFGYSSVHGQANKELRTKLALNSSNLSTTTMDVCKNFNTYKKEVWKGKRSVPSYKSDQPLDLHKDSIKLIYENNQFYVRLALLKKAEFAKYGFKDGFHFKMQVKDNSTKTILERCFDEVYKINASKLLYDQKKKKWKLNLSYSFDNKNISELDKEKILGVDVGVSYPLVASVFGDRDRFKIKGGEIEKFRKSVEARRRSMLEQTKYCGDGRIGHGRKKRTEPALNIGDKIARFRDTTNHKYSRALIEYAVKKGCGTIQMEKLTGITSKADRFLKDWTYYDLQTKIENKAKEVGINVVYIAPKYTSQRCSKCGYIHKDNRPNQAKFRCLECDFESNADYNASQNIGIKNIDKIIEKDLQKQESEVQVNENK

SEQ ID NO: 615 - protein, 460 aa, synthetic construct
MPIITRKIELHISKEGLSAEDYKAQWQYLRQINDNLYMAANRVSSHCFLNDEYKYRLCLQIPDYIDIEKQLKDSKRARLSKEELGQLKKRKKELENTVKGRFQDEFEKNSLYTIISNEFGEIIPGQILTCLRQCVQSKYNRAKEELEKGERAISTYKKGMPIPFPINKSIRLQKQGEDFVLKWYNKIVFKLHFGRDRSNNRVIVERLIQSALNDKQKGEDYVMNNSSIQLVEKDKMTKIFLLLSMDIPTQKRKLDSELVLGVDLGLNFPLYYATNQSANIHDHIGDKDIFLKERMVFQRRFKELQRLQCTQGGRGRKKKLEPLEKLRDKERNWVRTKNHIFSREVIKVALHLGAGTIHLENLHNFGKDGNGELKNSKKFVFRNWSYFELQSMIEYKAKMEGITVKYVNPAYTSQTCSVCGMIGERKEQAVFRCMNSSCLEYGKEVNADFNAARNIAKAKM

SEQ ID NO: 616 - protein, 478 aa, synthetic construct
MEEKTKRLQKVAKFQIVKPVNMTWVELGKMLRDVRYRLWRLANMAVCENYMRFYQWRIGKTDANENHKVKILNRRLREMIIEEKQADAKELMRYSRDGVVSGYICGAFEKIHLSAIKNKSKWREVIRGKSNLPLFKRDLPIPINCSDHKPSLIAKTESDEYEVDLRICQKPYPRVLLSTAKISGGERAILERLVSNKTNSLPGYRHRFFEIKEKPKGRWNLHVTYDFARSEATMLHSDIIVGVDLGWSVPLYAAVNKGHARIGWRKLEPLAKRIRHLQKQVKARRLSVQKGGQRDLAAPTARAGHGRKRILQPIEKLEGKIDDAYKTLNHQLSHCVIEFAKNNGAGVIQVENLEGLKDTLTGTFIGQNWRYNQLQNYIEYKAKEAGMELKKVNPCQTSQRCSNCGFIHRDFTFEYRQANKKNGKAAMFECPECSKKENYKPLNADYNAARNLATAGIEGKIRLQCEKQGIEYKGLPEE

SEQ ID NO: 617 - protein, 449 aa, synthetic construct
LIWKDALGGIILTKIVKLYLISEQIDKDGNRVDYKEINSILWNLQKQTRDIKNKTVQLCWEWMNFSSDYYKKNELYPNEKEILNLTLRGYAYDHFKQGYDLYSSNISVLTEAVCGAFKNAKKEMLNGEKSVLSYKAEQPLDIHKKCIKLEYDKNFYVKLKMLNKAGKKKYGIEDDLNFKIQVEDKSTRTILERCIDGEYVVSGSKLIYDKKKKLWKLNLCYSFKANEIESLDKNKILGIDLGIACPLMASVNGEFDRFSIKGGEIETFRKRIEARKRSVLHQTKYCGDGRIGHGRNKRTEPAYKINDKIARFRDTANHKYSRALIDYAIRKNCGMIQMENLTGISDKKEHFLKEWSYYDLQTKIENKAKEKGIKIVYINPEYTSQRCSKCGYIDANNRELRAVFKCQKCGFEADADYNASQNIGIKNIEDIIENTLKISSANEKQTKNT

SEQ ID NO: 618 - protein, 472 aa, synthetic construct
MKEKSKTLVKVARLRILKPAGDMTWSELGEMLRTVRYRVFRLANLAVSEAYLGFHMFRTQRAAEFKAETMGKLSRRLREMLIEEGVDEKELNCYSLTGAVPDTVAGALHQYKIRGITSPTKWRQVVRGQAALPTFRNDMSIPIRCDKPYQRRLEKTEAGEVEVELMICRKPYPRIVLGTADVGPGQEVILERLLQNKDNSSDGYRQRLFEAKQDRQTGKWWLYVTYDFPRPEEGELNPEIVVGVDLGFSVPLYVAINNGYARLGRRHFQALGNRIRSLQRQVLARRRSIQRGGRVNISHDTARSGHGIKRKLLPTEKLRGRIEKSYSTLNHQLSASVIDFTKNHHAGTIQIEDLANLKEVLAGTFIGARWRYHQLQQFLKYKADEAGITLKEVNPRYTSRRCSECGFIHKDFDRAFRDSGRTDGKVARFVCPECGYGPVDPDYNAAKNISTLDIEKHIRVQCKKQGLEYEVH

SEQ ID NO: 619 - protein, 453 aa, synthetic construct
MSKITRKIEIIPDIEGLTHDESNKKCYGAFYTFDKNLYKVANLLVSQLYGLDNLLSLMRLQNDEYVKCQSKLSLKSTTDAEKENLKKRMKKIDAELVSIKNGMAPKHPQTFAYRAVTNCVYAKNIPSDILNTLKQDVYKHFNDTKKEQFLGERSLTTYKRGMPVPFSIEKKHAIVCDGDNYYLPWFEDTRFRLNFGRDKSNNRAIIDNCIKTKRYKLCAAAKIQLKDKKLFLLVTVDIPATETTSVKGKVMGVDLGVVNPAYVAVNDGPERSRIGNGEAFQKQRDVFRRRFRELQRSQLTQGGHGRKHKTKATETLRGKERNWVQTENHRISREIVNLASRWKVECIQMESLKGYGKNQEGEVEDNHKRLLGRWSYFELQKDIEYKAAMVGIQVKYINPAYTSQTCHVCGQRGNRIERDTFICTNPECTCYNQAQDADMNAAINIAKSKDVVK

SEQ ID NO: 620 - protein, 431 aa, synthetic construct
MKEIAKVMKYQLIYLDGGGDFYELQQTLWDLQRQTREILNKTIQSMYLATATNTAFEENALYHRFGAEYPMMAALNVNATLRTAKKRYTSTIKETLRGTMSLPSYKRDQPILLHNQTIHLALEDGQYSALFSVYSEKFQKAHEGVARPRFALMARDGTQRAILDRLLDGSYRLGQSQMTYEQKKWFLSLTYKFVPEVRELDKSKILGVDLGCVYAIYASSMQQKGIFKISGDEITEFEKRQAAMQNREPVSTLERVEQLEQRRWQKQQQARYCGEGRVGHGTGTRVAPAYRDADKIARFRDTINHRYSKALVEYAEKNGFGTIQMEDLSGIKEDTGFPKRLRHWTYFDLQTKIQYKAAERGITVVKIDPQYTSQRCSRCGYIDKANRASQEKFLCQSCGFEANADYNASQNISVEKIDKLIAKDKKKLART

SEQ ID NO: 621 - protein, 478 aa, synthetic construct
MKDYIRKTLSLRILRPYYGEEIEKEIAAAKKKSQAEGGDGALDNKFWDRLKAEHPEIISSREFYDLLDAIQRETTLYYNRAISKLYHSLIVEREQVSTAKALSAGPYHEFREKFNAYISLGLREKIQSNFRRKELARYQVALPTAKSDTFPIPIYKGFDKNGKGGFKVREIENGDFVIDLPLMAYHRVGGKAGREYIELDRPPAVLNVPVILSTSRRRANKTWFRDEGTDAEIRRVMAGEYKVSWVEILQRKRFGKPYGGWYVNFTIKYQPRDYGLDPKVKGGIDIGLSSPLVCAVTNSLARLTIRDNDLVAFNRKAMARRRTLLRQNRYKRSGHGSANKLKPIEALTEKNELYRKAIMRRWAREAADFFRQHRAATVNMEDLTGIKDREDYFSQMLRCYWNYSQLQTMLENKLKEYGIAVKYIEPKDTSKTCHSCGHVNEYFDFNYRSAHKFPMFKCEKCGVECGADYNAARNIAQA

SEQ ID NO: 622 - protein, 491 aa, synthetic construct
TPFVLYFQNYSLSLRQHITLYSMPTITRKIELTLCTEGLSDQERKDQWNLLYHINDNLYRAANNISSKLYLDDHVGSMVRLKHAEYLSLLRAMEKAKKQKAPDEEVIAELSQQVAAAEQEMDEQAKAICQYATEMSTQTLSYRFATELETNIFGQILTCLRQGVFSTFNSDARDVKRGERSIRTYKKGMPIPFPWNDSLRIGFEDGEFYLRWYNGLRFRFDFGKDRSNNRLIVQRCMKMDKDYEGDYKLCNSSIQMVKREGKPKFFLLLVVNIPQERVELNKNIVVGVDLGINAPAYVATNTTPERKQIGDREHFLNERMAFQRRFKSLQRLKGTTGGRGRAKKLEPLERLRKAEQNWVHTQNHLFSREVIDFAVKARAATIHMEDLSGFGKDRDGNADERKEFVLRNWSYYELQNMITYKAAKYGIKVEKIRPAYTSKTCSWCGHQGFREGITFICENPECKKFGEKEHADYNAARNIANSKEIIKNNEE

SEQ ID NO: 623 - protein, 462 aa, synthetic construct
VFYSTFLCYILTKYIDFSANECYNINTSSEVKQLMNKVVKLALICEQSDKDNSPVDYKKINEILWELQKQTREIKNKAIQYCWEYNNFSSDYYKKFNEYPKEKDILSYTLVGFVNDKFKTGNDLYSGNCSTTVRNACTEFKNSKKELIKGSRSIINYRSNQPLDIHNKCIRIEFENNCFYTYLKLLNRPAFKKYNFANTEIKFKILVRDNSTKTILERCISNEYEIAASKLLYDQKKKCWFLNLVYAFEIKSNNSLDPNKILGVDLGIHYPICASVYGSLDRFTIDGGEIDEFRRRVESRKISMLKQGKNCGDGRIGHGIKARNKPVYNIEDKIARFRDTANHKYSRALIEYAVKHTCGTIQMEDLTGITDIANRFLKNWSYYDLQTKIEYKAKEAGINIVYIDPKNTSRRCSKCGYIDKENRETQSRFICLKCGFKENADYNASQNIGIKDIDKLIKEDVH

SEQ ID NO: 624 - protein, 430 aa, synthetic construct
LISEQIDKDGNRVDYKEINSILWNLQKQTRDIKNKTVQLCWEWMNFSSDYYKKNELYPNEKEILNLTLRGYAYDHFKQGYDLYSSNISVLTEAVCGAFKNAKKEMLNGEKSVLSYKAEQPLDIHKKCIKLEYDKNFYVKLKMLNKAGKKKYGIEDDLNFKIQVEDKSTRTILERCIDGEYVVSGSKLIYDKKKKLWKLNLCYSFKANEIESLDKNKILGIDLGIACPLMASVNGEFDRFSIKGGEIETFRKRIEARKRSVLHQTKYCGDGRIGHGRNKRTEPAYKINDKIARFRDTANHKYSRALIDYAIRKNCGMIQMENLTGISDNKEHFLKEWSYYDLQTKIENKAKEKGIKIVYINPEYTSQRCSKCGYIDANNRELRAVFKCQNCGFEADADYNASQNIGIKNIEDIIENTLKISSANEKQTKNT

SEQ ID NO: 625 - protein, 494 aa, synthetic construct
MFLYKELKTMAKTNAEEGKIENKEKRLTKVAKFQIVKPVNMTWPEFGKMLGDVRYRLSRVANMAVTEKYLESQQKRTGQKIQRENTLVTIANRKLREMLKKEKVKEEELDRYSRDGAVSGYVTGPFEHNKLSAISKRFKEVLKGNMSLPNFKREMAIPINCSNAKLSTIEKTETGEYVVDLRISQKPWPRVLLSTNRISNGQREILERLAANKTFSDDGYKHLFFEVKQQGKDWFLSVTYSFPKSEAPKLHKDIIVGVDLGWSVPLYAAVNKGYARIGWQKFRPLAERIKHLQKQVKARRITIQKGGQQDLATPTARTGHGRKRILRPIEKLERKIENAYTTLNHQLSHCVIEFAKNNGAGVIQIENLSGLANELSGTYIGQNWRYEQLQEYIRYKAEEAGIEVKHVNPCRTSQRCSECGFINDKFNFEYRQANRNNGMSAMFECPECKKNKKDYKPINADYNAAKNLTTANIDEIIRLQCKKQGIEYKELPKD

SEQ ID NO: 626 - protein, 469 aa, synthetic construct
MPTITRKIELHLCTEELSDEQQKAQRLLLYHINDNLYKAANNVSSKLYLDEHVSSMVRLKHDEYLSLLRELARAEKKADDELATQLREKLVAAEREMTDQELAICKYATEMSTQSLSYRFVTELETKIFAKILDCLKQGVYATFNSDSRDVKRGERAIRNYKKGMPIPFAWDKSVRIEYEEKEKDFFLRWYNDIRFKFHFGRDRSNNRLIVSRCMKLDKDYEGDYQLCNSSIQIVKRDGSTKYFLLLVVKIPQEHVELNKKIVVGVDLGINYPAFAATNCTEERMSIGDREHFLNTRMQFQRRFKSLQRLKGTTGGKGRNKKLEPLERLRKAEHNWVHTQNHLFSLKVVNFAVQAHAATIHLEDLSGFGKDDDGNADERKEFVLRNWSYYELQNMIKYKAKKFGIQVEKIRPAYTSQTCSWCGQRGFRQGITFICENPECKKCGEKENADYNAARNIANSKDIIKDKDE

SEQ ID NO: 627 - protein, 429 aa, synthetic construct
LVKVVKIYLISEQVDEQGKDVDYNTICGVLWDLQWETREIKNKTVQLCWEWSGFSSDYYKKYGEYPKEKNLLDYTMGGFVYDKLKSKYHLYTANLSTTSQNTCGIFRTYKVDFVKGNRSVLSFKADQPLDVHKKSISIDRIDDNYFVKLKLLNKSGIQKYGIRDDFHFRMLVKDNSTKTILERCVGGDYKAAASKIIYDKKKKMWCLNLSYEFDVNTAKDLNKNRILGIDIGIVYPVVASVNGELDRFVIQGGEIETFRRRVENRKKSLLKQTKYCGDGRIGHGRNKRTEPVDIISDQIARFRNTANHKYSRAVIDYAVRKQCGTIQMENLKGITDKSDRFLKNWSYYDLQQKIEYKAKEKGINVVFINPKYTSQRCSRCGYIDSANRPKLPNQSKFLCIKCGFTENADYNASQNIALYNIEKLIDAEA

SEQ ID NO: 628 - protein, 453 aa, synthetic construct
MSKITRKIELIPDIENLTHEESNQRCYKVFYNIDNKLYKVANLLVCQLFGLDNLLSLMRLQNDEYVKCQSKLASKSISEETKRDIKKRMEAIDKELLARKDEIAPKHPQTFAYRAIKDSDYAKDLPSDIFNTLKQDVFKHFNETKKEQLRGERSLTTYKRGIPVPFNLMKKNVIVSDGDNYYLTWFEETRFKLNFGKDRSNNRAIIDNCLKTNKYKLCTAAKIQLKNKKLFLLVTVDIPETKNKIIKGKVMGVDLGVVHPAYVAVNDGPERSLIGDGDAFQKQRDVFRRRFRELQRCQLTQGGHGRKHKTKATENLRGKERNWVQTENHRISREIVNLAIRWRVETIQMENLKGFGKDSDGDVETKHQRLLGRWSYFELQKDIEYKAAMAGIKVVYVNPAYTSQTCHVCGERGDRTERDTFICTNTECDCYGKPQDADMNAAINIARSKNIVK

SEQ ID NO: 629 - protein, 427 aa, synthetic construct
MTKVVKLPLICEQSDKDGNPIDYKKIYEILFELQRQTREIKNKSIQYCWEFSNFSSDYYKQNHEYPKEKDILSYTLVGFVNDKFKTGNDLYSGNCSTTVRGACGEFKNSKTDFLKGTKSIINYKGNQPLDLHNKTIRFECIGKDYYAYLKLLNRPAFQRNNFSSSEIKFKVLVYDNSSKTIVERCIDNIYKISASKLIYNEKKKCWVLNLSYSFTNNNVCELDENKILGVDLGIHYPICASVNGERKFFKIDGGEIDHTRRKIEVRKKSLLKQGSSCGEGRIGHGIKTRNKPVYNIEDKIACFRDTANHKYSRALINYAVNNNCGIIQMEKLTGITADSDRFLKNWSYFDLQTKIEYKAKEAGITVVYIDPQYTSQRCSKCGYISKENRKVQAKFCCQKCGYEANADYNASQNIGIKDIDKIIKNTK

SEQ ID NO: 630 - protein, 455 aa, synthetic construct
MAKKGTNRKKMIVKVMKYELKYESGCADFNEMQNELWKLQRQTREVMNRTIQLCYHWSYVQADYCKQHGCARRDVKPCDVYETNATSLDGYIYQLFKDEYPNFLMANLIATLRKAHQKYDALLFDIQEGNSSIPSFKKDQPLIFSKEAIRLPECLSDKRQITLFCFSKPYKSAHPTLDKITFAVRARSASEKSIFDHIISGKYALGESQLVYEKKKWFFLLSYKFTPESVDVNPEKVLGVDLGVVNALCAGSVENPHDSLFIKGTEAIEQIRRLEARKRDLQKQARYPGDGRIGHGTKTRVSPVYQTRDAIARMQDTLNHRWSRALIDFACKKGYGTIQMEDLSGIKALESEKPYLKHWTYFDLQSKIIYKAEEKGIRVVKVNPKCTSRRCSACGYISKENRKNQVEFLCVNCGYHHNADYNAAQNLSIPQIDRLIEKQLKEQESEENEAGANPK

SEQ ID NO: 631 - protein, 459 aa, synthetic construct
MIITRKIELWLSEDDNELRKAKWSYLKELNDEVYRAANFIVNNQYFNEILENRVIMQDTRLIDIDSEIRKLYKSREKNKEKIDELKKIKKIRYQEAKNFYQTSKQNVTYQLTSREFPNIPANIVTSLNASIIKTLKTEWNEIKSGKRAVRNYRKGMPIPFNFSSSQKWFENKGEDIFLNWLGGLKFKLFFGRDKSNNRAIVERAINKEYKYADSSIQLKDKKIFLLFVVDIPYEKANLNKNIAAGVDLGIAFPAFCALSEGYSRLSIGNKEDLLKVRLQMQSRRKRLQKALKITSGGKGRTKKLKALESLTNKEKNYVTTYNHKVSYQVIKFAKDNKAGIIKLEFLEGFGEDEKNKFILRNWSFYQLQKMIEYKAKREGIEVLYIDPYHTSQTCAICGNYEEGQREKQEDFICKNPECKNFEKIVNADYNAALNIAKSNKIVSSSEQCEYNKKHENNVL

SEQ ID NO: 632 - protein, 434 aa, synthetic construct
VVNVAKGALSKVMKFELSYLDGCGDFQNMQKELWTLQRQTREILNRTIQIAYHWDYTDREHFKKTGQHLDVKSETGYKRLDGYIYDELKETVQNFASVNVNATIQKAWAKYKSSKTDVLRGDMSLPSYKSDQPLVLHAQSIKLSEDKDGPVLQVTLFSNAHKKACDYSNVRFAFRLHDATQRAIFKNVLSGEYGLGQSQIVYKRPKWFLYLTYNFSPEQHGLDPDKILGVDLGESIALYASSLGDYGSLRIEGGEVTAFAKQLEARKRSLQKQAAHCGEGRVGHGTRARVSDVYKAEDKIANFRNTVNHRYSKKLIEYAIQNRYGTIQMEDLSGIKQDTGFPKFLQHWTYYDLQQKIEAKAKENGINFIKVDPSYTSQRCSKCGNIDSDNRPSQAVFCCTKCGFRANADFNASQNLSIPEIDKIIKKERGANTK

SEQ ID NO: 633 - protein, 410 aa, synthetic construct
MAKGTLSKVMKYELRYLDGCGDFQNMQKELWTLQRQSREILNRTIQIAYHWDYTDREQFKKTGQHLDIKAETGYKRLDGYIYDSLKEDVQNFASVNVNATIQKAWAKYKSSKIDVLRGDMSLPSYKSDQPLVLHAQSMKIFSSDDDDVLQVTLFSNAYKKACNYSNIRFIIGLHDATQRTIIKKVLSGDWGIGQSQIVYKRPKWFLYLTYNFSPEQHEVNPDKILGVDLGESIAIYASSIGEYGSLRIEGGEISAFAKQLEARKRSLQKQAAYCGKGRIGHGTKSRVSDVYKMEDKIANFRNTVNHRYSKMLIDYALKHMYGTIQMEDLSGIKKETGFPKFLQHWTYYDLQQKIEAKAKEHGINFIKVDPAFTSQRCSKCGNIDSENRPSQAVFCCKKCGYKTNADFNAS

SEQ ID NO: 634 - protein, 487 aa, synthetic construct
MPDTDKGKRLTKVATFQIVKPVNMSWNEFGKMLHDVRYRYWRLANMAVCENYMRFYRWRTQQTDTNDHYKVKIINGILRKMLIEEKNADEKELSRYSRDGAVSGYVYGAFTQTKLSAITSKSKWGEVIKGKSALPLFKRDTSIPIMCTDKKPSMIEKTASGEYEVDLRICLKDKQLRPNGYPSVLLSTTKISDGQKAVLERLVSNKTNSLPGYRHRFFEVKEKRGDWYLSVSYDFPQAEATRLHPDIIVGVDLGWSVPLYAAINNGYARIGWRKLEPLAKSIKHLQKQTIVRRRSFQKGGKKDLAASTARTGHGIKRILQPIEKLEGKIDNAYKTLNHQLSHCIIEFAKNHGAGVIQIENLKGLAEELSGTFIGQNWRYHQLQEFIKYKAEEAGIAVKEVNPRYTSRRCSKCGYIHIGFDREYRDKNRKNGKSTMFECPECSKRIKDYKPLNADYNAAKNLATADIEEKIRLQCKEQGIEYKELPKD

SEQ ID NO: 635 - protein, 426 aa, synthetic construct
MNVTKVMRYQLIYQGGGGDFESLQNQLWEFQRQTRAILNKTIQTMYLATANQEKFSEKALYHDLCAEYPDMISSTVNATLREATKKYRSSVREILAGRMSLPSYKRDHPILLHNQSVALKQGNQGSYFATISVFSRKYQQGTPGVKQPSFQLIAKDNTQRTILQRLLSGEYKLGQCQLIYIRPKWFLNVAYSFTPSEKALDQEKVLGVDLGCVYAIYASSYGNHGIFKISGDEITSFERKQAAIQNRAFKNDLTRIREIEERRKQKLEQARYCGEGRIGHGVKTRVAPAYQDEGKISRFRETINHRYSKALVDYAEKNGYGTIQMEDLSGIKSSTGFPKRLQHWTYFDLQQKIKYKAEEQGIKVVKIKPAYTSQRCSRCGHIDPANRKSQSEFKCIACGFSSNADYNASQNISMRNIEKIIQGKAN

SEQ ID NO: 636 - protein, 443 aa, synthetic construct
VTLLVKVVKIYLISEQFDKAGNQIDYKEVNKILWELQKQTREAKNKTVQLLWEWNNFSSDYVKASGIYPKAKDIFGYSSVHGQANKELRTKLALNSSNLSTTTMDVCKIFNTYKKEVWEGKRSVPSYKSDQPLDLHKESIKLIYENNEFYVRLALLKKAEFAKYGFKDGFRFKMQVKDNSTKTILERCFDEVYKINASKLLYDQKKKKWKLNLSYSFDNKNISELDKEKILGVDVGVNCPLVASVFGDRDRFIIKGGEIEKFRKSVEARRRSMLEQTKYCGDGRIGHGRKKRTEPALNIGDKIARFRDTTNHKYSRALIEYAVKKGCGTIQMEKLTGITSKSDRFLKDWTYYDLQTKIENKAKEVGINVVYIAPKYTSQRCSKCGYIHKDNRPNQAKFRCLECDFESNADYNASQNIGIKNIDKIIEKDLQKQESEVQVNENK

SEQ ID NO: 637 - protein, 448 aa, synthetic construct
MTWPELGNMLRTVRYRVFRLANLAVSEAYLGFHMFRTKRAEEFKAETMGKLSRRLREMLIEEGVDEKDLSRYSQTGAVPDTVAGALSQYKIRGITSPTKWRQIVRGQVALPTFRNTMSIPVRCDKLYQRRLEQGDSGEVEVELMICRNPYPRVVLGTGDLNPGQQAILERLLQNTDNSADGYRQRLFEIKEDVQTRKWWLYVTYDFPKTTGKLNPEIVVGVDLGFSIPLYVALNSGHARLGYLHFKALGERIKSLQKQVMARRRAIQRGGRVSISHSTARTGHGVKRKLQPTEKLRGRIEKSYSTLNHQLSASVIDFAKNHHAGVIQIEDLSGLKEQLTGTFIGARWRYHQLQQFLKYKAEEAGITLKQINPRYTSRRCSECGFINMDFDRAFRDAGRTYGKVTKFLCPECGYEADPDYNAARNIATLDIEKLIRVQCEKHGLKFDAH

SEQ ID NO: 638 - protein, 478 aa, synthetic construct
MAGQRHTKVAKFQILKPAADMRWSELGRLLRDAQYRVYRLANLALSEKYLRFHLFRTGQTESLPECRIGRLNRQLRQMLKDEGGADDSVLDRFSRTGALPDTVVGALWQYRLHALTKGEKWNKVTRGETALPTFRRSMALPIRCDKRIHHRLERAALDSVELDLMICTRPYPRVILKTAKLDDGAAAILERLLDNEGQLLEGYRQRCFEVRYAEDEKAWWLHVTYDSPATPAPHLSKDIIVGVDLGFSCPMYVALSNGDARLGRRQFAALAARIRSLQTQVMARRRQMLSGGKASLSGDTARSGHGRKRKLLPIESLEGRINRAYTTLNHQLSISVVHFAVHHGAGVIQIENLEGLQNELTGTFLGQRWRYHQLQEFLNYKANEAGIEVRRVNPRYTSRRCSKCGYIHVDFNRAFRDAARQEGKVARFCCPKCEYEAHPDYNAARNLATVDIEGIIKVQCERQGIDRPSVENQDEVAK

SEQ ID NO: 639 - protein, 442 aa, synthetic construct
MGKPITKTMKYQIHYIDGCGDFHNMQKELWDLQRIVRQILNKTINESYLWFVRSEQYYRDTGENLSVEEQTGYKTLDGHIYNLLKQEYTQKLVSNSLNASIQAAYKKMKDSRRDVMIGTMSLPSYRSDQPIIIYNKNIKFSSHPEHGFVVDCSLFSDAYKKSQGYEKSVKFQVSVDDNTQRSIFENILTGNYKHGQCSIVYEKKKWFLLLTYSFVPEETKLDPDKILGVDVGVVYALYASSKGNHGTFKIKGDEAITFIQRVEARKHSRQLQGTYCGDGRIGHGTKTRVQPVYNERALISNFQDTINHRYSKALIDYAKKNGYGTIQMEDLSGIKEVQQYPKYLQHWTYYDLQLKIQYKAKEAGIGFVKVTPKYTSQRCSHCGNIDEANRPKQDVFRCTVCGYERNADYNASQNLSIKGIDRIIDDQLKQMNKANPKKTENA

SEQ ID NO: 640 - protein, 463 aa, synthetic construct
MPTMTRKIELKLCTEGLSDEERKAQLGLLYHINDNLYKAANNISSKLYLDDHVSSMVRLKHAEYLSLLNEFEKAKKKGDEEQIVELSLRVAAAEKELTDQELAICKYATEMSTDTLAYRFANEIEINVFGQILACLKQGIHSTFKKDAADVKRGERAIRNFKKGMPIPFPWSKSIRIENEGSDFYLRWYNGLRFRFDFGKDRSNNRLIVSRCLNLDPDFEDEYKLSNSSLQMVKRDGRPKLFLLLVVNIPQENVELNKKIVVGVDLGINSPAYVATNITMERQRIGSRDTFLNARMAIQRRFQSLQKLQNTAGGRGRKKKLEPLERLKETERNWVRTQNHLFSRDVVQFAVKTRAATIHMEDLSGFGKDDDGNADEKKEFVLRNWSYYELQTMIKYKAAKYGIKVEKIRPAYTSRTCSWCGHEGDRKGETFICENPECEKYGKKENADYNAARNIANSTDIIK

SEQ ID NO: 641 - protein, 453 aa, synthetic construct
MSIVTRKIELIPDIENLTHEESNQRCYKLLYNIDKKLYKLANLLVCQLFGLDNLLSLMRLQNDEYVKFQSKLASKSISKETQKNIKEHMKEIDKELLARKAEIAPKSPLTFAYRAIKGSLYAKDLPSDIFNTLKQDVFKHFNETKKEQLRGERSLATYKRGIPIPFSLMKKNVIVSEGDNYYLTWFEETRFKLNFGKDRSNNRAIIDNCLKTNKYKLCTAAKIQLKNKKLFFLVTVDIPETKNTIIKGKVMGVDLGVVHPAYVAVNDGPERSLIGDGDAFQKQRDVFRRRFKELQRCQLTQGGHGRKHKTKATEILRGKERNWVQTENHRISRKIVNLAIRWKVESIQMENLKGFGKDSEGEVETKHKRLLGRWSYFELQKDIEYKAQKAGIKVVYINPAYTSQTCHVCGKKGDRTERDTFICLNTECSCYGKPQDADMNAAINIARSKNIVK

SEQ ID NO: 642 - protein, 372 aa, synthetic construct
MVITRKIEVFVCEDSKDLRKEYYDKIYKCRDIAVKTANLGVSHLFMLDNTTPYLSDDDREKLTFLGCSGKKATKQNAPYVAASEKFKGQADMSMLSSVLQNVGKMYQDDKKKGMWSKSLRSYKANMPIPFKASCYRNLRFADYNDKEDKPHNGCFFTLMGIPFQCKFGKDRSGNRIIMQAVVDGKYKMCTSSLQIDGKKIFLLLCVDIPKKVVKLDESKTLYAFLGVMNPIVCTTDIKQKGDIDTDWKLWEIGTEAEFNYRRRQIQEAVKRCQVNNRYSRGGHGRFAKTKAIERWRAVERNYVDTKLHTYSKMLIDLAVKHKCGKIVLMNQLHREDAAKDDKFVLRNWSYHSLRTKIDYKAKMYGIKVEVEK

SEQ ID NO: 643 - protein, 477 aa, synthetic construct
VGKEGKRNVKVMKIRILKPCDGMTWNELGQLLRDARYRVFRLANLTVSEAYLNFHLWRTGRSQEFKKQTIGQLNRQLRNILQQEKYDDEKLNRYSKTGALPDTVCSALWQYKLMAVMKKSKWSEVIRGKSSLPTFRNDMAIPVRCDKPEQKRIEKTEQGQVEAALQVCVQPYPRVILGTHTLGDGQDAILKRLLDNQNQAIGGYRQRSFEIKYDEQKRWWLFITYDFPATEVATDKTIAVGVDLGVSVPLYAAVNNGPARLGRREFGGLGRRIRDLRNQTDARRRSIQRSGREGQSDDTARAGHGRKRKLLPIHILEGRLDKAYTTLNHQMSAAVIKFAAEQGAGIIQIENLAGLQDELRGTFIGGRWRYRQLQDFLKYKTQEMGIELRQVNPKYTSRRCSKCGFIHKDFDRDYRNRHSENGKPAQFVCPNPDCKYESDPDYNAARNLATLDIEEQIRVQCQKQGLEYDSKKDKNAL

SEQ ID NO: 644 - protein, 435 aa, synthetic construct
MSGGAITKVMKYDLTYKDGYGNFKDMQEAVWKLIRDTRTILNETIKIAYHWDYLNEKSKRETGEHLDLLEETGYKRLDGYIYDDLKDRFPDFASSNLNAAIQTAWKKYKQSQKDVYIGKMTLPSYKSDQPLPINKQSIKIYDEEREHIVELNLFSTKHKKEHGLASNVRFRINLHDNTQHAIYERVLSGEYTLGQCQLLYDRPKWFFILTYSFKPAQNKLDPDKILGVDMGETCALYASTFGEQGSFVINGGEVSEYAKREEARKRSLQKQAAVCGEGRIGHGTKTRVSSVYKEQERISNFRDTINHRYSKALIEYAVKNGCGTIQMEDLSGIRQSTDFPKFLRHWTYYDLQQKIKTKAKETGIAVSMIDPRYTSQRCSRCGHIDKANRKDQAHFHCLKCGYSCNADFNASQNISIRGIDKIIQKELGAKAKQTD

SEQ ID NO: 645 - protein, 436 aa, synthetic construct
MGQVTKVMRYQLIYQDGGGDFYTVQQELWELQRQTREILNKTIQTMYLADANKEKFDNAAERTLNRRFCVDHPDMYTKTVTATLRKAKAKYNASQKEILAGRMSLPSYKRDQPILLNPQGFKIEEESDSFFAAIAVFSDKYKNKHPDVDVKRLRFRLVVKDGTQRAIIRRVISGEYKLGRSQLLYSKKKWFLNVTYSFEPAEKKVDPDKILGVDLGCVYAIYASSFGSPGVFKISGDEVSSFERKQAAIQNRSPKSTLERVEKIEERHKQKQQQARYCGEGRIGHGTKTRIAPVYQDEDKIARFRDTVNHRYSKALIDYAEKNGYGTIQMEDLSGIKSATGFPKRLKHWTYYDLQTKIEYKAEERGIKVVKIDPRYTSQRCSRCGYIDSGNRKSQAEFCCMACGFSCNADYNASQNISIGGIAKIIADKRKEADAK

SEQ ID NO: 646 - protein, 470 aa, synthetic construct
MKEKAKTLVKVARLRILKPAGDMTWPELGNMLRTVRYRVFRLANLAVSEAYLGFHMFRTKRAEEFKAETMGKLSRRLREMLIEEGVDEKDLSRYSQTGAVPDTVAGALSQYKIRGITSPTKWRQIVRGQVALPTFRNTMSIPVRCDKLYQRRLEQGDSGEVEVELMICRNPYPRVVLGTGDLNPGQQAILERLLQNTDNSADGYRQRLFEIKEDVQTRKWWLYVTYDFPKTTGKLNPEIVVGVDLGFSIPLYVALNSGHARLGYLHFKALGERIKSLQKQVMARRRAIQRGGRVSISHSTARTGHGVKRKLQPTEKLRGRIEKSYSTLNHQLSASVIDFAKNHHAGVIQIEDLSGLKEQLTGTFIGARWRYHQLQQFLKYKAEEAGITLKQINPRYTSRRCSECGFINMDFDRAFRDAGRTYGKVTKFLCPECGYEADPDYNAARNIATLDIEKLIRVQCEKHGLKFDAH

SEQ ID NO: 647 - protein, 480 aa, synthetic construct
MPFKVLKLKIIKPVNMDWNELGQSIRDTRYRVYRLANLAVSEAYLAFHLWRAGKTDAIPKATAGQLNRRLRDMLLEEARTKAVKDRKNTGEKGTEDDAKKAQKEMNKFSKTGALPDTVAGALFMYKVKGLISKGKWTQVIRGKSALPTFRNNMAIPIRCDKKTQRRLERTENGVELELMIRNKPYPRVLLGTQGIGEGAEAIIERLLSNESQAEQGYKQRYFEVREDVNRTWWLYVCYALPASTPPRLDPSKIVGVDLGFTCPMYAAISNGHARLGYRAFSSLAARVKALKLRTMRRRREIQRGGRTIVSGEAARSGHGRKRKLLGIEKLQGRVNQAYTTLNHQMSAAVVKFAIENGAGTIQVENLEGLREELSGTFLGQMWRYFQLQEFLQYKAEENGIVIRKVNPRYTSRRCSQCGHINKEFTRKARDRNAEGGYSAKFKCPDCEYEADADYNAAKNLAVDGIEGIIEKQCGSQGIVL

SEQ ID NO: 648 - protein, 368 aa, synthetic construct
YLDIREETGYKTLDGYIYNCLKGAYSEMASANLNAAVQKAWKKYKNSKTQVLQGVMSLPSYKSDQPILIDKGNVKLSAEENNGRAVLTLFSRNYRDTRGLKGNVEFSVLLHDGTQKSIFRNLIDKTYALGQCQLVYERKKWFLLLTYSFTPAGHALDPEKILGVDLGECYALYASSCYAPGILKIEGGEIAEYALRLEKRKRSLQQQARYCGEGRIGHGTKTRVGVVYKAEDRIASFRETINHRYSKELVDYAVSNGYGTIQMEDLSAIQKDLGFPKRLRHWTYYDLQMKITNKAKEHGIAVVKIDPRYTSQRCSKCGHIDPANRPRQEEFCCTACGYACNADYNASQNISIKGIEKIIQKMLSAKAD

SEQ ID NO: 649 - protein, 471 aa, synthetic construct
MKEKSKTLVKVARLRILKPAGDMKWSELGEMLRTVRYRVFRLANLAVSEAYLGFHMYRTNRATEFKAETIGKLSRRLREMLIEEGVDEKDLSRYSQTGAVPDTVAGALGQYKIRGITSPTKWRQVVRGQAALPTFRNDMAIPIRCDKQYQRRLEKTEAGEIEVELMICRKPYPRIVLGTADLGPGQRAILERLLQNTDNSADGYRQRLFEAKQDTQTKKWWLYVTYDFPRLKEGKLNQEIVVGVDLGFSIPLYVALNIGHARLGRRHFQALGNRIRSLQRQVLARRRSIQRGGRVNISHSTARSGHGRKRKLLPTEKLRGRIEKSYSTLNHQLSASVIDFAKNHHAGTIQIEDLANLKEELAGTFIGARWRYHQLQQFLKYKAEEAGITLNQVNPRYTSRRCSECGFINIDFDRAFRDAGRTEGRVTKFLCPECGYEADPDYNAARNISILDIDKLIRVQCKKQGLTYDAH

SEQ ID NO: 650 - protein, 455 aa, synthetic construct
MAKKGTNRKKMIVKVMKYELKYEKGCADFNEMQNELWKLQRQTREVMNRTVQLCYHWNYVQADYCKQHGCAHRDVKPCDVYETNATSLDGYIYQLFKDEYPNFLMANLIATLRKAHQKYDALLPDIQEGNSSIPSFKKDQPLIFSKEAIHLPECLSDKRQITLFCFSKPYKSAHPTLDKITFAVRAHSASEKSIFDNIINGKYALGTSQLVYEKKKWFFLLSYKFTPESVDVNPEKVLGVDLGVVNALCAGSVENPHDSLFIKGTEAIEQIRRLEARKRDLQKQARYPGDGRIGHGTKTRVSPVYQTRDAIARMQDTLNHRWSRALIDFACKKGYGTIQMEDLSGIKAMESEKPYLKHWTYFDLQSKIIYKAEEKGIRVVKVNPKCTSRRCSACGYISKENRKNQAEFLCVNCGYHHNADYNAAQNLSIPQIDRLIEKQLKEQESEESEAGANPK

SEQ ID NO: 651 - protein, 468 aa, synthetic construct
MAKKAKTMFKVTNFRILKPAGDMTWKELGQLLRDARYRTFRMANLALSEAYLNFYLLKKGDLKEYKNVKIGQIAKRLRDMLIEEGVDEEVQNRFSPKVALPAYVYSALDQFKLRGLTSKSNWKKVLRGQASLPTFRLNMSVPIRCDKPEHRRLEKTENGNVEVDLMICRKPYPRVVLETLKLDGSSKAILDRLLENEDNSPGNYRQRCFEVKQNPRSNDWWLYVTYEMPVDKDKKLDPKVIVGVDLGFSVPLYVAINNGHARLGRRHFQALGKRIHNLQNQVLARRRSIQRGGQVNLSHSTSRSGHGRKRKLQPTEKLQQKINSAYSTLNHQLSSSVIDFANNHKAGTIQIEDLETLKEQLTGTYIGRQWRYYQLQQFIEYKAKENSITVKKINPKYTSRRCSMCGHIHADFDRTFRDRSSNKGFVTKFICPECNFEADPDYNAAKNISTLDIENKIKLQCKKQKIDY

SEQ ID NO: 652 - protein, 437 aa, synthetic construct
MAEKTIVKVMKFELRYIDGAGEFSEMQKHLWELQKQTREVLNKTIQMGYALECKRFAHHDKTGQWLDDKELTGSKYKAVADYINAELKEDYNIFYSDCRNSTVRKAYKKFKDAKNKIFSGEMSLPSYRSNQPIIIHNRNVIIRGNAESALVGLKVFSDGFKALHGFPAAVNFKLCVKDGTQRAIIENVISEIYKISESQLIYDNKKWFLILAYRFTQKKNDLNPDKILGVDLGVKFAVYASSIGEYGSFRIKGGEVTEFIKRLEKRKKSLQNQATVCGDGRIGHGTKTRVADVYKARDKISNFQDTINHRYSRAIVDYARKNGYGTIQLEKLDNSIEKKGDYSPVLVHWTYYDLRTKMEYKAAEYGIKVIAVEPKYTSQRCSKCGYISSENRKTQESFECIKCGYKCNADFNASQNLSVRDIDRIIDEYLGANPELT

SEQ ID NO: 653 - protein, 472 aa, synthetic construct
MPGTEKRLQKVATFEIVKPVNMSWPEFGKMLRDVRYRYWRLANMAVCENYMRFYQWRTQQTDANDRYKVKTLNRILRKMLIEEKNADEKELSRYSRDGAVSGYICGAFEKTKLSAVKSSSKWKKVIAGKESLPLFKKDLAIPINCSDHQPRLIERTQSGEYEVDLRICQQPYPRVLLSTAKISDGQKAILERLVSNETNSLPGYRHRFFEIKEKRNKWYLSVSYDFPKIDATRLHPNIIVGVDLGWSVPLYAAISNGYARIGYRKLKALGDRIKALQRQTIARRRSIQRTGEQDLSAPTARSGHGRKRILHPIEKLEGKIDNAYKTLNHQLSHCVIEFAKNHGAGLIQVENLKGLAEELSGTFIGQNWRYNQLQEFIKYKAKEAGIEVKEVNPCYTSRRCSECGFIHKEFTFEYRQANKKTDKATMFECPKCGYKAIADYNAARNLANPDIAEKIRLQCKEQGIEYKELPKD

SEQ ID NO: 654 - protein, 707 aa, synthetic construct
MADTPTLFTQFLRHHLPGQRFRKDILKQAGRILANKGEDATIAFLRGKSEESPPDFQPPVKCPIIACSRPLTEWPIYQASVAIQGYVYGQSLAEFEASDPGCSKDGLLGWFDKTGVCTDYFSVQGLNLIFQNARKRYIGVQTKVTNRNEKRHKKLKRINAKRIAEGLPELTSDEPESALDETGHLIDPPGLNTNIYCYQQVSPKPLALSEVNQLPTAYAGYSTSGDDPIQPMVTKDRLSISKGQPGYIPEHQRALLSQKKHRRMRGYGLKARALLVIVRIQDDWAVIDLRSLLRNAYWRRIVQTKEPSTITKLLKLVTGDPVLDATRMVATFTYKPGIVQVRSAKCLKNKQGSKLFSERYLNETVSVTSIDLGSNNLVAVATYRLVNGNTPELLQRFTLPSHLVKDFERYKQAHDTLEDSIQKTAVASLPQGQQTEIRMWSMYGFREAQERVCQELGLADGSIPWNVMTATSTILTDLFLARGGDPKKCMFTSEPKKKKNSKQVLYKIRDRAWAKMYRTLLSKETREAWNKALWGLKRGSPDYARLSKRKEELARRCVNYTISTAEKRAQCGRTIVALEDLNIGFFHGRGKQEPGWVGLFTRKKENRWLMQALHKAFLELAHHRGYHVIEVNPAYTSQTCPVCRHCDPDNRDQHNREAFHCIGCGFRGNADLDVATHNIAMVAITGESLKRARGSVASKTPQPLAAE

SEQ ID NO: 655 - protein, 757 aa, synthetic construct
MPKPAVESEFSKVLKKHFPGERFRSSYMKRGGKILAAQGEEAVVAYLQGKSEEEPPNFQPPAKCHVVTKSRDFAEWPIMKASEAIQRYIYALSTTERAACKPGKSSESHAAWFAATGVSNHGYSHVQGLNLIFDHTLGRYDGVLKKVQLRNEKARARLESINASRADEGLPEIKAEEEEVATNETGHLLQPPGINPSFYVYQTISPQAYRPRDEIVLPPEYAGYVRDPNAPIPLGVVRNRCDIQKGCPGYIPEWQREAGTAISPKTGKAVTVPGLSPKKNKRMRRYWRSEKEKAQDALLVTVRIGTDWVVIDVRGLLRNARWRTIAPKDISLNALLDLFTGDPVIDVRRNIVTFTYTLDACGTYARKWTLKGKQTKATLDKLTATQTVALVAIDLGQTNPISAGISRVTQENGALQCEPLDRFTLPDDLLKDISAYRIAWDRNEEELRARSVEALPEAQQAEVRALDGVSKETARTQLCADFGLDPKRLPWDKMSSNTTFISEALLSNSVSRDQVFFTPAPKKGAKKKAPVEVMRKDRTWARAYKPRLSVEAQKLKNEALWALKRTSPEYLKLSRRKEELCRRSINYVIEKTRRRTQCQIVIPVIEDLNVRFFHGSGKRLPGWDNFFTAKKENRWFIQGLHKAFSDLRTHRSFYVFEVRPERTSITCPKCGHCEVGNRDGEAFQCLSCGKTCNADLDVATHNLTQVALTGKTMPKREEPRDAQGTAPARKTKKASKSKAPPAEREDQTPAQEPSQTS

SEQ ID NO: 656 - protein, 765 aa, synthetic construct
MYILEMADLKSEPSLLAKLLRDRFPGKYWLPKYWKLAEKKRLTGGEEAACEYMADKQLDSPPPNFRPPARCVILAKSRPFEDWPVHRVASKAQSFVIGLSEQGFAALRAAPPSTADARRDWLRSHGASEDDLMALEAQLLETIMGNAISLHGGVLKKIDNANVKAAKRLSGRNEARLNKGLQELPPEQEGSAYGADGLLVNPPGLNLNIYCRKSCCPKPVKNTARFVGHYPGYLRDSDSILISGTMDRLTIIEGMPGHIPAWQREQGLVKPGGRRRRLSGSESNMRQKVDPSTGPRRSTRSGTVNRSNQRTGRNGDPLLVEIRMKEDWVLLDARGLLRNLRWRESKRGLSCDHEDLSLSGLLALFSGDPVIDPVRNEVVFLYGEGIIPVRSTKPVGTRQSKKLLERQASMGPLTLISCDLGQTNLIAGRASAISLTHGSLGVRSSVRIELDPEIIKSFERLRKDADRLETEILTAAKETLSDEQRGEVNSHEKDSPQTAKASLCRELGLHPPSLPWGQMGPSTTFIADMLISHGRDDDAFLSHGEFPTLEKRKKFDKRFCLESRPLLSSETRKALNESLWEVKRTSSEYARLSQRKKEMARRAVNFVVEISRRKTGLSNVIVNIEDLNVRIFHGGGKQAPGWDGFFRPKSENRWFIQAIHKAFSDLAAHHGIPVIESDPQRTSMTCPECGHCDSKNRNGVRFLCKGCGASMDADFDAACRNLERVALTGKPMPKPSTSCERLLSATTGKVCSDHSLSHDAIEKAS

SEQ ID NO: 657 - protein, 766 aa, synthetic construct
MEKEITELTKIRREFPNKKFSSTDMKKAGKLLKAEGPDAVRDFLNSCQEIIGDFKPPVKTNIVSISRPFEEWPVSMVGRAIQEYYFSLTKEELESVHPGTSSEDHKSFFNITGLSNYNYTSVQGLNLIFKNAKAIYDGTLVKANNKNKKLEKKFNEINHKRSLEGLPIITPDFEEPFDENGHLNNPPGINRNIYGYQGCAAKVFVPSKHKMVSLPKEYEGYNRDPNLSLAGFRNRLEIPEGEPGHVPWFQRMDIPEGQIGHVNKIQRFNFVHGKNSGKVKFSDKTGRVKRYHHSKYKDATKPYKFLEESKKVSALDSILAIITIGDDWVVFDIRGLYRNVFYRELAQKGLTAVQLLDLFTGDPVIDPKKGVVTFSYKEGVVPVFSQKIVPRFKSRDTLEKLTSQGPVALLSVDLGQNEPVAARVCSLKNINDKITLDNSCRISFLDDYKKQIKDYRDSLDELEIKIRLEAINSLETNQQVEIRDLDVFSADRAKANTVDMFDIDPNLISWDSMSDARVSTQISDLYLKNGGDESRVYFEINNKRIKRSDYNISQLVRPKLSDSTRKNLNDSIWKLKRTSEEYLKLSKRKLELSRAVVNYTIRQSKLLSGINDIVIILEDLDVKKKFNGRGIRDIGWDNFFSSRKENRWFIPAFHKAFSELSSNRGLCVIEVNPAWTSATCPDCGFCSKENRDGINFTCRKCGVSYHADIDVATLNIARVAVLGKPMSGPADRERLGDTKKPRVARSRKTMKRKDISNSTVEAMVTA

SEQ ID NO: 658 - protein, 812 aa, synthetic construct
MDMLDTETNYATETPAQQQDYSPKPPKKAQRAPKGFSKKARPEKKPPKPITLFTQKHFSGVRFLKRVIRDASKILKLSESRTITFLEQAIERDGSAPPDVTPPVHNTIMAVTRPFEEWPEVILSKALQKHCYALTKKIKIKTWPKKGPGKKCLAAWSARTKIPLIPGQVQATNGLFDRIGSIYDGVEKKVTNRNANKKLEYDEAIKEGRNPAVPEYETAYNIDGTLINKPGYNPNLYITQSRTPRLITEADRPLVEKILWQMVEKKTQSRNQARRARLEKAAHLQGLPVPKFVPEKVDRSQKIEIRIIDPLDKIEPYMPQDRMAIKASQDGHVPYWQRPFLSKRRNRRVRAGWGKQVSSIQAWLTGALLVIVRLGNEAFLADIRGALRNAQWRKLLKPDATYQSLFNLFTGDPVVNTRTNHLTMAYREGVVNIVKSRSFKGRQTREHLLTLLGQGKTVAGVSFDLGQKHAAGLLAAHFGLGEDGNPVFTPIQACFLPQRYLDSLTNYRNRYDALTLDMRRQSLLALTPAQQQEFADAQRDPGGQAKRACCLKLNLNPDEIRWDLVSGISTMISDLYIERGGDPRDVHQQVETKPKGKRKSEIRILKIRDGKWAYDFRPKIADETRKAQREQLWKLQKASSEFERLSRYKINIARAIANWALQWGRELSGCDIVIPVLEDLNVGSKFFDGKGKWLLGWDNRFTPKKENRWFIKVLHKAVAELAPHRGVPVYEVMPHRTSMTCPACHYCHPTNREGDRFECQSCHVVKNTDRDVAPYNILRVAVEGKTLDRWQAEKKPQAEPDRPMILIDNQES

SEQ ID NO: 659 - protein, 812 aa, synthetic construct
MDMLDTETNYATETPAQQQDYSPKPPKKAQRAPKGFSKKARPEKKPPKPITLFTQKHFSGVRFLKRVIRDASKILKLSESRTITFLEQAIERDGSAPPDVTPPVHNTIMAVTRPFEEWPEVILSKALQKHCYALTKKIKIKTWPKKGPGKKCLAAWSARTKIPLIPGQVQATNGLFDRIGSIYDGVEKKVTNRNANKKLEYDEAIKEGRNPAVPEYETAYNIDGTLINKPGYNPNLYITQSRTPRLITEADRPLVEKILWQMVEKKTQSRNQARRARLEKAAHLQGLPVPKFVPEKVDRSQKIEIRIIDPLDKIEPYMPQDRMAIKASQDGHVPYWQRPFLSKRRNRRVRAGWGKQVSSIQAWLTGALLVIVRLGNEAFLADIRGALRNAQWRKLLKPDATYQSLFNLFTGDPVVNTRTNHLTMAYREGVVDIVKSRSFKGRQTREHLLTLLGQGKTVAGVSFDLGQKHAAGLLAAHFGLGEDGNPVFTPIQACFLPQRYLDSLTNYRNRYDALTLDMRRQSLLALTPAQQQEFADAQRDPGGQAKRACCLKLNLNPDEIRWDLVSGISTMISDLYIERGGDPRDVHQQVETKPKGKRKSEIRILKIRDGKWAYDFRPKIADETRKAQREQLWKLQKASSEFERLSRYKINIARAIANWALQWGRELSGCDIVIPVLEDLNVGSKFFDGKGKWLLGWDNRFTPKKENRWFIKVLHKAVAELAPHKGVPVYEVMPHRTSMTCPACHYCHPTNREGDRFECQSCHVVKNTDRDVAPYNILRVAVEGKTLDRWQAEKKPQAEPDRPMILIDNQES

SEQ ID NO: 660 - protein, 793 aa, synthetic construct
MSSLPTPLELLKQKHADLFKGLQFSSKDNKMAGKVLKKDGEEAALAFLSERGVSRGELPNFRPPAKTLVVAQSRPFEEFPIYRVSEAIQLYVYSLSVKELETVPSGSSTKKEHQRFFQDSSVPDFGYTSVQGLNKIFGLARGIYLGVITRGENQLQKAKSKHEALNKKRRASGEAETEFDPTPYEYMTPERKLAKPPGVNHSIMCYVDISVDEFDFRNPDGIVLPSEYAGYCREINTAIEKGTVDRLGHLKGGPGYIPGHQRKESTTEGPKINFRKGRIRRSYTALYAKRDSRRVRQGKLALPSYRHHMMRLNSNAESAILAVIFFGKDWVVFDLRGLLRNVRWRNLFVDGSTPSTLLGMFGDPVIDPKRGVVAFCYKEQIVPVVSKSITKMVKAPELLNKLYLKSEDPLVLVAIDLGQTNPVGVGVYRVMNASLDYEVVTRFALESELLREIESYRQRTNAFEAQIRAETFDAMTSEEQEEITRVRAFSASKAKENVCHRFGMPVDAVDWATMGSNTIHIAKWVMRHGDPSLVEVLEYRKDNEIKLDKNGVPKKVKLTDKRIANLTSIRLRFSQETSKHYNDTMWELRRKHPVYQKLSKSKADFSRRVVNSIIRRVNHLVPRARIVFIIEDLKNLGKVFHGSGKRELGWDSYFEPKSENRWFIQVLHKAFSETGKHKGYYIIECWPNWTSCTCPKCSCCDSENRHGEVFRCLACGYTCNTDFGTAPDNLVKIATTGKGLPGPKKRCKGSSKGKNPKIARSSETGVSVTESGAPKVKKSSPTQTSQSSSQSAP

SEQ ID NO: 661 - protein, 441 aa, synthetic construct
MNKIEKEKTPLAKLMNENFAGLRFPFAIIKQAGKKLLKEGELKTIEYMTGKGSIEPLPNFKPPVKCLIVAKRRDLKYFPICKASCEIQSYVYSLNYKDFMDYFSTPMTSQKQHEEFFKKSGLNIEYQNVAGLNLIFNNVKNTYNGVILKVKNRNEKLKKKAIKNNYEFEEIKTFNDDGCLINKPGINNVIYCFQSISPKILKNITHLPKEYNDYDCSVDRNIIQKYVSRLDIPESQPGHVPEWQRKLPEFNNTNNPRRRRKWYSNGRNISKGYSVDQVNQAKIEDSLLAQIKIGEDWIILDIRGLLRDLNRRELISYKNKLTIKDVLGFFSDYPIIDIKKNLVTFCYKEGVIQVVSQKSIGNKKSKQLLEKLIENKPIALVSIDLGQTNPVSVKISKLNKINNKISIESFTYRFLNEEILKEIEKYRKDYDKLELKLINEA

SEQ ID NO: 662 - protein, 812 aa, synthetic construct
MDMLDTETNYATETPSQQQDYSPKPPKKDRRAPKGFSKKARPEKKPPKPITLFTQKHFSGVRFLKRVIRDASKILKLSESRTITFLEQAIERDGSAPPDVTPPVHNTIMAVTRPFEEWPEVILSKALQKHCYALTKKIKIKTWPKKGPGKKCLAAWSARTKIPLIPGQVQATNGLFDRIGSIYDGVEKKVTNRNANKKLEYDEAIKEGRNPAVPEYETAYNIDGTLINKPGYNPNLYITQSRTPRLITEADRPLVEKILWQMVEKKTQSRNQARRARLEKAAHLQGLPVPKFVPEKVDRSQKIEIRIIDPLDKIEPYMPQDRMAIKASQDGHVPYWQRPFLSKRRNRRVRAGWGKQVSSIQAWLTGALLVIVRLGNEAFLADIRGALRNAQWRKLLKPDATYQSLFNLFTGDPVVNTRTNHLTMAYREGVVDIVKSRSFKGRQTREHLLTLLGQGKTVAGVSFDLGQKHAAGLLAAHFGLGEDGNPVFTPIQACFLPQRYLDSLTNYRNRYDALTLDMRRQSLLALTPAQQQEFADAQRDPGGQAKRACCLKLNLNPDEIRWDLVSGISTMISDLYIERGGDPRDVHQQVETKPKGKRKSEIRILKIRDGKWAYDFRPKIADETRKAQREQLWKLQKASSEFERLSRYKINIARAIANWALQWGRELSGCDIVIPVLEDLNVGSKFFDGKGKWLLGWDNRFTPKKENRWFIKVLHKAVAELAPHRGVPVYEVMPHRTSMTCPACHYCHPTNREGDRFECQSCHVVKNTDRDVAPYNILRVAVEGKTLDRWQAEKKPQAEPDRPMILIDNQES

SEQ ID NO: 663 - protein, 812 aa, synthetic construct
MDMLDTETNYATETPSQQQDYSPKPPKKDRRAPKGFSKKARPEKKPPKPITLFTQKHFSGVRFLKRVIRDASKILKLSESRTITFLEQAIERDGSAPPDVTPPVHNTIMAVTRPFEEWPEVILSKALQKHCYALTKKIKIKTWPKKGPGKKCLAAWSARTKIPLIPGQVQATNGLFDRIGSIYDGVEKKVTNRNANKKLEYDEAIKEGRNPAVPEYETAYNIDGTLINKPGYNPNLYITQSRTPRLITEADRPLVEKILWQMVEKKTQSRNQARRARLEKAAHLQGLPVPKFVPEKVDRSQKIEIRIIDPLDKIEPYMPQDRMAIKASQDGHVPYWQRPFLSKRRNRRVRAGWGKQVSSIQAWLTGALLVIVRLGNEAFLADIRGALRNAQWRKLLKPDATYQSLFNLFTGDPVVNTRTNHLTMAYREGVVNIVKSRSFKGRQTREHLLTLLGQGKTVAGVSFDLGQKHAAGLLAAHFGLGEDGNPVFTPIQACFLPQRYLDSLTNYRNRYDALTLDMRRQSLLALTPAQQQEFADAQRDPGGQAKRACCLKLNLNPDEIRWDLVSGISTMISDLYIERGGDPRDVHQQVETKPKGKRKSEIRILKIRDGKWAYDFRPKIADETRKAQREQLWKLQKASSEFERLSRYKINIARAIANWALQWGRELSGCDIVIPVLEDLNVGSKFFDGKGKWLLGWDNRFTPKKENRWFIKVLHKAVAELAPHRGVPVYEVMPHRTSMTCPACHYCHPTNREGDRFECQSCHVVKNTDRDVAPYNILRVAVEGKTLDRWQAEKKPQAEPDRPMILIDNQES

SEQ ID NO: 664 - protein, 761 aa, synthetic construct
MSNKTTPPSPLSLLLRAHFPGLKFESQDYKIAGKKLRDGGPEAVISYLTGKGQAKLKDVKPPAKAFVIAQSRPFIEWDLVRVSRQIQEKIFGIPATKGRPKQDGLSETAFNEAVASLEVDGKSKLNEETRAAFYEVLGLDAPSLHAQAQNALIKSAISIREGVLKKVENRNEKNLSKTKRRKEAGEEATFVEEKAHDERGYLIHPPGVNQTIPGYQAVVIKSCPSDFIGLPSGCLAKESAEALTDYLPHDRMTIPKGQPGYVPEWQHPLLNRRKNRRRRDWYSASLNKPKATCSKRSGTPNRKNSRTDQIQSGRFKGAIPVLMRFQDEWVIIDIRGLLRNARYRKLLKEKSTIPDLLSLFTGDPSIDMRQGVCTFIYKAGQACSAKMVKTKNAPEILSELTKSGPVVLVSIDLGQTNPIAAKVSRVTQLSDGQLSHETLLRELLSNDSSDGKEIARYRVASDRLRDKLANLAVERLSPEHKSEILRAKNDTPALCKARVCAALGLNPEMIAWDKMTPYTEFLATAYLEKGGDRKVATLKPKNRPEMLRRDIKFKGTEGVRIEVSPEAAEAYREAQWDLQRTSPEYLRLSTWKQELTKRILNQLRHKAAKSSQCEVVVMAFEDLNIKMMHGNGKWADGGWDAFFIKKRENRWFMQAFHKSLTELGAHKGVPTIEVTPHRTSITCTKCGHCDKANRDGERFACQKCGFVAHADLEIATDNIERVALTGKPMPKPESERSGDAKKSVGARKAAFKPEEDAEAAE

SEQ ID NO: 665 - protein, 781 aa, synthetic construct
MRQPAEKTAFQVFRQEVIGTQKLSGGDAKTAGRLYKQGKMEAAREWLLKGARDDVPPNFQPPAKCLVVAVSHPFEEWDISKTNHDVQAYIYAQPLQAEGHLNGLSEKWEDTSADQHKLWFEKTGVPDRGLPVQAINKIAKAAVNRAFGVVRKVENRNEKRRSRDNRIAEHNRENGLTEVVREAPEVATNADGFLLHPPGIDPSILSYASVSPVPYNSSKHSFVRLPEEYQAYNVEPDAPIPQFVVEDRFAIPPGQPGYVPEWQRLKCSTNKHRRMRQWSNQDYKPKAGRRAKPLEFQAHLTRERAKGALLVVMRIKEDWVVFDVRGLLRNVEWRKVLSEEAREKLTLKGLLDLFTGDPVIDTKRGIVTFLYKAEITKILSKRTVKTKNARDLLLRLTEPGEDGLRREVGLVAVDLGQTHPIAAAIYRIGRTSAGALESTVLHRQGLREDQKEKLKEYRKRHTALDSRLRKEAFETLSVEQQKEIVTVSGSGAQITKDKVCNYLGVDPSTLPWEKMGSYTHFISDDFLRRGGDPNIVHFDRQPKKGKVSKKSQRIKRSDSQWVGRMRPRLSQETAKARMEADWAAQNENEEYKRLARSKQELARWCVNTLLQNTRCITQCDEIVVVIEDLNVKSLHGKGAREPGWDNFFTPKTENRWFIQILHKTFSELPKHRGEHVIEGCPLRTSITCPACSYCDKNSRNGEKFVCVACGATFHADFEVATYNLVRLATTGMPMPKSLERQGGGEKAGGARKARKKAKQVEKIVVQANANVTMNGASLHSP

SEQ ID NO: 666 - protein, 793 aa, synthetic construct; identical to SEQ ID NO: 660

SEQ ID NO: 667 - protein, 717 aa, synthetic construct; identical to SEQ ID NO: 2

SEQ ID NO: 668 - protein, 761 aa, synthetic construct; identical to SEQ ID NO: 664

SEQ ID NO: 669 - protein, 765 aa, synthetic construct
MYSLEMADLKSEPSLLAKLLRDRFPGKYWLPKYWKLAEKKRLTGGEEAACEYMADKQLDSPPPNFRPPARCVILAKSRPFEDWPVHRVASKAQSFVIGLSEQGFAALRAAPPSTADARRDWLRSHGASEDDLMALEAQLLETIMGNAISLHGGVLKKIDNANVKAAKRLSGRNEARLNKGLQELPPEQEGSAYGADGLLVNPPGLNLNIYCRKSCCPKPVKNTARFVGHYPGYLRDSDSILISGTMDRLTIIEGMPGHIPAWQREQGLVKPGGRRRRLSGSESNMRQKVDPSTGPRRSTRSGTVNRSNQRTGRNGDPLLVEIRMKEDWVLLDARGLLRNLRWRESKRGLSCDHEDLSLSGLLALFSGDPVIDPVRNEVVFLYGEGIIPVRSTKPVGTRQSKKLLERQASMGPLTLISCDLGQTNLIAGRASAISLTHGSLGVRSSVRIELDPEIIKSFERLRKDADRLETEILTAAKETLSDEQRGEVNSHEKDSPQTAKASLCRELGLHPPSLPWGQMGPSTTFIADMLISHGRDDDAFLSHGEFPTLEKRKKFDKRFCLESRPLLSSETRKALNESLWEVKRTSSEYARLSQRKKEMARRAVNFVVEISRRKTGLSNVIVNIEDLNVRIFHGGGKQAPGWDGFFRPKSENRWFIQAIHKAFSDLAAHHGIPVIESDPQRTSMTCPECGHCDSKNRNGVRFLCKGCGASMDADFDAACRNLERVALTGKPMPKPSTSCERLLSATTGKVCSDHSLSHDAIEKAS

SEQ ID NO: 670 - protein, 766 aa, synthetic construct
MEKEITELTKIRREFPNKKFSSTDMKKAGKLLKAEGPDAVRDFLNSCQEIIGDFKPPVKTNIVSISRPFEEWPVSMVGRAIQEYYFSLTKEELESVHPGTSSEDHKSFFNITGLSNYNYTSVQGLNLIFKNAKAIYDGTLVKANNKNKKLEKKFNEINHKRSLEGLPIITPDFEEPFDENGHLNNPPGINRNIYGYQGCAAKVFVPSKHKMVSLPKEYEGYNRDPNLSLAGFRNRLEIPEGEPGHVPWFQRMDIPEGQIGHVNKIQRFNFVHGKNSGKVKFSDKTGRVKRYHHSKYKDATKPYKFLEESKKVSALDSILAIITIGDDWVVFDIRGLYRNVFYRELAQKGLTAVQLLDLFTGDPVIDPKKGVVTFSYKEGVVPVFSQKIVPRFKSRDTLEKLTSQGPVALLSVDLGQNEPVAARVCSLKNINDKITLDNSCRISFLDDYKKQIKDYRDSLDELEIKIRLEAINSLETNQQVEIRDLDVFSADRAKANTVDMFDIDPNLISWDSMSDARVSTQISDLYLKNGGDESRVYFEINNKRIKRSDYNISQLVRPKLSDSTRKNLNDSIWKLKRTSEEYLKLSKRKLELSRAVVNYTIRQSKLLSGINDIVIILEDLDVKKKFNGRGIRDIGWDNFFSSRKENRWFIPAFHKTFSELSSNRGLCVIEVNPAWTSATCPDCGFCSKENRDGINFTCRKCGVSYHADIDVATLNIARVAVLGKPMSGPADRERLGDTKKPRVARSRKTMKRKDISNSTVEAMVTA

SEQ ID NO: 671 - protein, 870 aa, synthetic construct
MLVRTSTLVQDNKNSRSASRAFLKKPKMPKNKHIKEPTELAKLIRELFPGQRFTRAINTQAGKILKHKGRDEVVEFLKNKGIDKEQFMDFRPPTKARIVATSGAIEEFSYLRVSMAIQECCFGKYKFPKEKVNGKLVLETVGLTKEELDDFLPKKYYENKKSRDRFFLKTGICDYGYTYAQGLNEIFRNTRAIYEGVFTKVNNRNEKRREKKDKYNEERRSKGLSEEPYDEDESATDESGHLINPPGVNLNIWTCEGFCKGPYVTKLSGTPGYEVILPKVFDGYNRDPNEIISCGITDRFAIPEGEPGHIPWHQRLEIPEGQPGYVPGHQRFADTGQNNSGKANPNKKGRMRKYYGHGTKYTQPGEYQEVFRKGHREGNKRRYWEEDFRSEAHDCILYVIHIGDDWVVCDLRGPLRDAYRRGLVPKEGITTQELCNLFSGDPVIDPKHGVVTFCYKNGLVRAQKTISAGKKSRELLGALTSQGPIALIGVDLGQTEPVGARAFIVNQARGSLSLPTLKGSFLLTAENSSSWNVFKGEIKAYREAIDDLAIRLKKEAVATLSVEQQTEIESYEAFSAEDAKQLACEKFGVDSSFILWEDMTPYHTGPATYYFAKQFLKKNGGNKSLIEYIPYQKKKSKKTPKAVLRSDYNIACCVRPKLLPETRKALNEAIRIVQKNSDEYQRLSKRKLEFCRRVVNYLVRKAKKLTGLERVIIAIEDLKSLEKFFTGSGKRDNGWSNFFRPKKENRWFIPAFHKAFSELAPNRGFYVIECNPARTSITDPDCGYCDGDNRDGIKFECKKCGAKHHTDLDVAPLNIAIVAVTGRPMPKTVSNKSKRERSGGEKSVGASRKRNHRKSKANQEMLDATSSAAE

SEQ ID NO: 672 - protein, 830 aa, synthetic construct
MPKIKKPTEISLLRKEVFPDLHFAKDRMRAASLVLKNEGREAAIEYLRVNHEDKPPNFMPPAKTPYVALSRPLEQWPIAQASIAIQKYIFGLTKDEFSATKKLLYGDKSTPNTESRKRWFEVTGVPNFGYMSAQGLNAIFSGALARYEGVVQKVENRNKKRFEKLSEKNQLLIEEGQPVKDYVPDTAYHTPETLQKLAENNHVRVEDLGDMIDRLVHPPGIHRSIYGYQQVPPFAYDPDNPKGIILPKAYAGYTRKPHDIIEAMPNRLNIPEGQAGYIPEHQRDKLKKGGRVKRLRTTRVRVDATETVRAKAEALNAEKARLRGKEAILAVFQIEEDWALIDMRGLLRNVYMRKLIAAGELTPTTLLGYFTETLTLDPRRTEATFCYHLRSEGALHAEYVRHGKNTRELLLDLTKDNEKIALVTIDLGQRNPLAAAIFRVGRDASGDLTENSLEPVSRMLLPQAYLDQIKAYRDAYDSFRQNIWDTALASLTPEQQRQILAYEAYTPDDSKENVLRLLLGGNVMPDDLPWEDMTKNTHYISDRYLADGGDPSKVWFVPGPRKRKKNAPPLKKPPKPRELVKRSDHNISHLSEFRPQLLKETRDAFEKAKIDTERGHVGYQKLSTRKDQLCKEILNWLEAEAVRLTRCKTMVLGLEDLNGPFFNQGKGKVRGWVSFFRQKQENRWIVNGFRKNALARAHDKGKYILELWPSWTSQTCPKCKHVHADNRHGDDFVCLQCGARLHADAEVATWNLAVVAIQGHSLPGPVREKSNDRKKSGSARKSKKANESGKVVGAWAAQATPKRATSKKETGTARNPVYNPLETQASCPAP

SEQ ID NO: 673 - protein, 790 aa, synthetic construct
MTPSPQIARLVETPLAAALKAHHPGKKFRSDYLKKAGKILKDQGVEAAMAHLDGKDQAEPPNFKPPAKCRIVARSREFSEWPIVKASVEIQKYIYGLTLEERKACDPGKSSASHKAWFAKTGVNTFGYSSVQGFNLIFGHTLGRYDGVLVKTENLNKKRAEKNERFRAKALAEGRAEPVCPPLVTATNDTGQDVTLEDGRVVRPGQLLQPPGINPNIYAYQQVSPKAYVPGIIELPEEFQGYSRDPNAVILPLVPRDRLSIPKGQPGYVPEPHREGLTGRKDRRMRRYYETERGTKLKRPPLTAKGRADKANEALLVVVRIDSDWVVMDVRGLLRNARWRRLVSKEGITLNGLLDLFTGDPVLNPKDCSVSRDTGDPVNDPRHGVVTFCYKLGVVDVCSKDRPIKGFRTKEVLERLTSSGTVGMVSIDLGQTNPVAAAVSRVTKGLQAETLETFTLPDDLLGKVRAYRAKTDRMEEGFRRNALRKLTAEQQAEITRYNDATEQQAKALVCSTYGIGPEEVPWERMTSNTTYISDHILDHGGDPDTVFFMATKRGQNKPTLHKRKDKAWGQKFRPAISVETRLARQAAEWELRRASLEFQKLSVWKTELCRQAVNYVMERTKKRTQCDVIIPVIEDLPVPLFHGSGKRDPGWANFFVHKRENRWFIDGLHKAFSELGKHRGIYVFEVCPQRTSITCPKCGHCDPDNRDGEKFVCLSCQATLNADLDVATTNLVRVALTGKVMPRSERSGDAQTPGPARKARTGKIKGSKPTSAPQGATQTDAKAHLSQTGV

SEQ ID NO: 674 - protein, 790 aa, synthetic construct
MTPSPQIARLVETPLAAALKAHHPGKKFRSDYLKKAGKILKDQGVEAAMAHLDGKDQAEPPNFKPPAKCRIVARSREFSEWPIVKASVEIQKYIYGLTLEERKACDPGKSSASHKAWFAKTGVNTFGYSSVQGFNLIFGHTLGRYDGVLVKTENLNKKRAEKNERFRAKALAEGRAEPVCPPLVTATNDTGQDVTLEDGRVVRPGQLLQPPGINPNIYAYQQVSPKAYVPGIIELPEEFQGYSRDPNAVILPLVPRDRLSIPKGQPGYVPEPHREGLTGRKDRRMRRYYETERGTKLKRPPLTAKGRADKANEALLVVVRIDSDWVVMDVRGLLRNARWRRLVSKEGITLNGLLDLFTGDPVLNPKDCSVSRDTGDPVNDPRHGVVTFCYKLGVVDVCSKDRPIKGFRTKEVLERLTSSGTVGMVSIDLGQTNPVAAAVSRVTKGLQAETLETFTLPDDLLGKVRAYRAKTDRMEEGFRRNALRKLTAEQQAEITRYNDATEQQAKALVCSTYGIGPEEVPWERMTSNTTYISDHILDHGGDPDTVFFMATKRGQNKPTLHKRKDKAWGQKFRPAISVETRLARQAAEWELRRASLEFQKLSVWKTELCRQAVNYVMERTKKRTQCDVIIPVIEDLPVPLFHGSGKRDPGWANFFVHKRENRWFIDGLHKAFSELGKHRGIYVFEVCPQRTSITCPKCGHCDPDNRDGEKFVCLSCQATLHADLDVATTNLVRVALTGKVMPRSERSGDAQTPGPARKARTGKIKGSKPTSAPQGATQTDAKAHLSQTGV

SEQ ID NO: 675 - protein, 782 aa, synthetic construct
MKTEKPKTALTLLREEVFPGKKYRLDVLKEAGKKLSTKGREATIEFLTGKDEERPQNFQPPAKTSIVAQSRPFDQWPIVQVSLAVQKYIYGLTQSEFEANKKALYGETGKAISTESRRAWFEATGVDNFGFTAAQGINPIFSQAVARYEGVIKKVENRNEKKLKKLTKKNLLRLESGEEIEDFEPEATFNEEGRLLQPPGANPNIYCYQQISPRIYDPSDPKGVILPQIYAGYDRKPEDIISAGVPNRLAIPEGQPGYIPEHQRAGLKTQGRIRCRASVEAKARAAILAVVHLGEDWVVLDLRGLLRNVYWRKLASPGTLTLKGLLDFFTGGPVLDARRGIATFSYTLKSAAAVHAENTYKGKGTREVLLKLTENNSVALVTVDLGQRNPLAAMIARVSRTSQGDLTYPESVEPLTRLFLPDPFLEEVRKYRSSYDALRLSIREAAIASLTPEQQAEIRYIEKFSAGDAKKNVAEVFGIDPTQLPWDAMTPRTTYISDLFLRMGGDRSRVFFEVPPKKAKKAPKKPPKKPAGPRIVKRTDGMIARLREIRPRLSAETNKAFQEARWEGERSNVAFQKLSVRRKQFARTVVNHLVQTAQKMSRCDTVVLGIEDLNVPFFHGRGKYQPGWEGFFRQKKENRWLINDMHKALSERGPHRGGYVLELTPFWTSLRCPKCGHTDSANRDGDDFVCVKCGAKLHSDLEVATANLALVAITGQSIPRPPREQSSGKKSTGTARMKKTSGETQGKGSKACVSEALNKIEQGTARDPVYNPLNSQVSCPAP

SEQ ID NO: 676 - protein, 774 aa, synthetic construct
VYNPDMKKPNNIRRIREEHFEGLCFGKDVLTKAGKIYEKDGEEAAIDFLMGKDEEDPPNFKPPAKTTIVAQSRPFDQWPIYQVSQAVQERVFAYTEEEFNASKEALFSGDISSKSRDFWFKTNNISDQGIGAQGLNTILSHAFSRYSGVIKKVENRNKKRLKKLSKKNQLKIEEGLEILEFKPDSAFNENGLLAQPPGINPNIYGYQAVTPFVFDPDNPGDVILPKQYEGYSRKPDDIIEKGPSRLDIPKGQPGYVPEHQRKNLKKKGRVRLYRRTPPKTKALASILAVLQIGKDWVLFDMRGLLRSVYMREAATPGQISAKDLLDTFTGCPVLNTRTGEFTFCYKLRSEGALHARKIYTKGETRTLLTSLTSENNTIALVTVDLGQRNPAAIMISRLSRKEELSEKDIQPVSRRLLPDRYLNELKRYRDAYDAFRQEVRDEAFTSLCPEHQEQVQQYEALTPEKAKNLVLKHFFGTHDPDLPWDDMTSNTHYIANLYLERGGDPSKVFFTRPLKKDSKSKKPRKPTKRTDASISRLPEIRPKMPEDARKAFEKAKWEIYTGHEKFPKLAKRVNQLCREIANWIEKEAKRLTLCDTVVVGIEDLSLPPKRGKGKFQETWQGFFRQKFENRWVIDTLKKAIQNRAHDKGKYVLGLAPYWTSQRCPACGFIHKSNRNGDHFKCLKCEALFHADSEVATWNLALVAVLGKGITNPDSKKPSGQKKTGTTRKKQIKGKNKGKETVNVPPTTQEVEDIIAFFEKDDETVRNPVYKPTGT

SEQ ID NO: 677 - protein, 769 aa, synthetic construct
MKKPNNIRRIREEHFEGLCFGKDVLTKAGKIYEKDGEEAAIDFLMGKDEEDPPNFKPPAKTTIVAQSRPFDQWPIYQVSQAVQERVFAYTEEEFNASKEALFSGDISSKSRDFWFKTNNISDQGIGAQGLNTILSHAFSRYSGVIKKVENRNKKRLKKLSKKNQLKIEEGLEILEFKPDSAFNENGLLAQPPGINPNIYGYQAVTPFVFDPDNPGDVILPKQYEGYSRKPDDIIEKGPSRLDIPKGQPGYVPEHQRKNLKKKGRVRLYRRTPPKTKALASILAVLQIGKDWVLFDMRGLLRSVYMREAATPGQISAKDLLDTFTGCPVLNTRTGEFTFCYKLRSEGALHARKIYTKGETRTLLTSLTSENNTIALVTVDLGQRNPAAIMISRLSRKEELSEKDIQPVSRRLLPDRYLNELKRYRDAYDAFRQEVRDEAFTSLCPEHQEQVQQYEALTPEKAKNLVLKHFFGTHDPDLPWDDMTSNTHYIANLYLERGGDPSKVFFTRPLKKDSKSKKPRKPTKRTDASISRLPEIRPKMPEDARKAFEKAKWEIYTGHEKFPKLAKRVNQLCREIANWIEKEAKRLTLCDTVVVGIEDLSLPPKRGKGKFQETWQGFFRQKFENRWVIDTLKKAIQNRAHDKGKYVLGLAPYWTSQRCPACGFIHKSNRNGDHFKCLKCEALFHADSEVATWNLALVAVLGKGITNPDSKKPSGQKKTGTTRKKQIKGKNKGKETVNVPPTTQEVEDIIAFFEKDDETVRNPVYKPTGT

SEQ ID NO: 678 - protein, 767 aa, synthetic construct
VIKTHFPAGRFRKDHQKTAGKKLKHEGEEACVEYLRNKVSDYPPNFKPPAKGTIVAQSRPFSEWPIVRASEAIQKYVYGLTVAELDVFSPGTSKPSHAEWFAKTGVENYGYRQVQGLNTIFQNTVNRFKGVLKKVENRNKKSLKRQEGANRRRVEEGLPEVPVTVESATDDEGRLLQPPGVNPSIYGYQGVAPRVCTDLQGFSGMSVDFAGYRRDPDAVLVESLPEGRLSIPKGERGYVPEWQRDPERNKFPLREGSRRQRKWYSNACHKPKPGRTSKYDPEALKKASAKDALLVSISIGEDWAIIDVRGLLRDARRRGFTPEEGLSLNSLLGLFTEYPVFDVQRGLITFTYKLGQVDVHSRKTVPTFRSRALLESLVAKEEIALVSVDLGQTNPASMKVSRVRAQEGALVAEPVHRMFLSDVLLGELSSYRKRMDAFEDAIRAQAFETMTPEQQAEITRVCDVSVEVARRRVCEKYSISPQDVPWGEMTGHSTFIVDAVLRKGGDESLVYFKNKEGETLKFRDLRISRMEGVRPRLTKDTRDALNKAVLDLKRAHPTFAKLAKQKLELARRCVNFIEREAKRYTQCERVVFVIEDLNVGFFHGKGKRDRGWDAFFTAKKENRWVIQALHKAFSDLGLHRGSYVIEVTPQRTSMTCPRCGHCDKGNRNGEKFVCLQCGATLHADLEVATDNIERVALTGKAMPKPPVRERSGDVQKAGTARKARKPLKPKQKTEPSVQEGSSDDGVDKSPGDASRNPVYNPSDTLSI

SEQ ID NO: 679 - protein, 763 aa, synthetic construct
MAKAKTLAALLRELLPGQHLAPHHRWVANKLLMTSGDAAAFVIGKSVSDPVRGSFRKDVITKAGRIFKKDGPDAAAAFLDGKWEDRPPNFQPPAKAAIVAISRSFDEWPIVKVSCAIQQYLYALPVQEFESSVPEARAQAHAAWFQDTGVDDCNFKSTQGLNAIFNHGKRTYEGVLKKAQNRNDKKNLRLERINAKRAEAGQAPLVAGPDESPTDDAGCLLHPPGINANIYCYQQVSPRPYEQSCGIQLPPEYAGYNRLSNVAIPPMPNRLDIPQGQPGYVPEHHRHGIKKFGRVRKRYGVVPGRNRDADGKRTRQVLTEAGAAAKARDSVLAVIRIGDDWTVVDLRGLLRNAQWRKLVPDGGITVQGLLDLFTGDPVIDPRRGVVTFIYKADSVGIHSEKVCRGKQSKNLLERLCAMPEKSSTRLDCARQAVALVSVDLGQRNPVAARFSRVSLAEGQLQAQLVSAQFLDDAMVAMIRSYREEYDRFESLVREQAKAALSPEQLSEIVRHEADSAESVKSCVCAKFGIDPAGLSWDKMTSGTWRIADHVQAAGGDVEWFFFKTCGKGKEIKTVRRSDFNVAKQFRLRLSPETRKDWNDAIWELKRGNPAYVSFSKRKSEFARRVVNDLVHRARRAVRCDEVVFAIEDLNISFFHGKGQRQMGWDAFFEVKQENRWFIQALHKAFVERATHKGGYVLEVAPARTSTTCPECRHCDPESRRGEQFCCIKCRHTCHADLEVATFNIEQVALTGVSLPKRLSSTLL

SEQ ID NO: 680 - protein, 761 aa, synthetic construct
MSKEKTPPSAYAILKAKHFPDLDFEKKHKMMAGRMFKNGASEQEVVQYLQGKGSESLMDVKPPAKSPILAQSRPFDEWEMVRTSRLIQETIFGIPKRGSIPKRDGLSETQFNELVASLEVGGKPMLNKQTRAIFYGLLGIKPPTFHAMAQNILIDLAINIRKGVLKKVDNLNEKNRKKVKRIRDAGEQDVMVPAEVTAHDDRGYLNHPPGVNPTIPGYQGVVIPFPEGFEGLPSGMTPVDWSHVLVDYLPHDRLSIPKGSPGYIPEWQRPLLNRHKGRRHRSWYANSLNKPRKSRTEEAKDRQNAGKRTALIEAERLKGVLPVLMRFKEDWLIIDARGLLRNARYRGVLPEGSTLGNLIDLFSDSPRVDTRRGICTFLYRKGRAYSTKPVKRKESKETLLKLTEKSTIALVSIDLGQTNPLTAKLSKVRQVDGCLVAEPVLRKLIDNASEDGKEIARYRVAHDLLRARILEDAIDLLGIYKDEVVRARSDTPDLCKERVCRFLGLDSQAIDWDRMTPYTDFIAQAFVAKGGDPKVVTIKPNGKPKMFRKDRSIKNMKGIRLDISKEASSAYREAQWAIQRESPDFQRLAVWQSQLTKRIVNQLVAWAKKCTQCDTVVLAFEDLNIGMMHGSGKWANGGWNALFLHKQENRWFMQAFHKALTELSAHKGIPTIEVLPHRTSITCTQCGHCHPGNRDGERFKCLKCEFLANTDLEIATDNIERVALTGLPMPKGERSSAKRKPGGTRKTKKSKHSGNSPLAAE

SEQ ID NO: 681 - protein, 746 aa, synthetic construct
MEKAGPTSPLSVLIHKNFEGCRFQIDHLKIAGRKLAREGEAAAIEYLLDKKCEGLPPNFQPPAKGNVIAQSRPFTEWAPYRASVAIQKYIYSLSVDERKVCDPGSSSDSHEKWFKQTGVQNYGYTHVQGLNLIFKHALARYDGVLKKVDNRNEKNRKKAERVNSFRREEGLPEEVFEEEKATDETGHLLQPPGVNHSIYCYQSVRPKPFNPRKPGGISLPEAYSGYSLKPQDELPIGSLDRLSIPPGQPGYVPEWQRSQLTTQKHRRKRSWYSAQKWKPRTGRTSTFDPDRLNCARAQGAILAVVRIHEDWVVFDVRGLLRNALWRELAGKGLTVRDLLDFFTGDPVVDTKRGVVTFTYKLGKVDVHSLRTVRGKRSKKVLEDLTLSSDVGLVTIDLGQTNVLAADYSKVTRSENGELLAVPLSKSFLPKHLLHEVTAYRTSYDQMEEGFRRKALLTLTEDQQVEVTLVRDFSVESSKTKLLQLGVDVTSLPWEKMSSNTTYISDQLLQQGADPASLFFDGERDGKPCRHKKKDRTWAYLVRPKVSPETRKALNEALWALKNTSPEFESLSKRKIQFSRRCMNYLLNEAKRISGCGQVVFVIEDLNVRVHHGRGKRAIGWDNFFKPKRENRWFMQALHKAASELAIHRGMHIIEACPARSSITCPKCGHCDPENRCSSDREKFLCVKCGAAFHADLEVATFNLRKVALTGTALPKSIDHSRDGLIPKGARNRKLKEPQANDEKACA

SEQ ID NO: 682 - protein, 735 aa, synthetic construct
MKEQSPLSSVLKSNFPGKKFLSADIRVAGRKLAQLGEAAAVEYLSPRQRDSVPNFRPPAFCTVVAKSRPFEEWPIYKASVLLQEQIYGMTGQEFEERCGSIPTSLSGLRQWASSVGLGAAMEGLHVQGMNLMVKNAINRYKGVLVKVENRNKKLVEANEAKNSSREERGLPPLRPPELGSAFGPDGRLVNPPGIDKSIRLYQGVSPVPVVKTTGRPTVHRLDIPAGEKGHVPLWQREAGLVKEGPRRRRMWYSNSNLKRSRKDRSAEASEARKADSVVVRVSVKEDWVDIDVRGLLRNVAWRGIERAGESTEDLLSLFSGDPVVDPSRDSVVFLYKEGVVDVLSKKVVGAGKSRKQLEKMVSEGPVALVSCDLGQTNYVAARVSVLDESLSPVRSFRVDPREFPSADGSQGVVGSLDRIRADSDRLEAKLLSEAEASLPEPVRAEIEFLRSERPSAVAGRLCLKLGIDPRSIPWEKMGSTTSFISEALSAKGSPLALHDGAPIKDSRFAHAARGRLSPESRKALNEALWERKSSSREYGVISRRKSEASRRMANAVLSESRRLTGLAVVAVNLEDLNMVSKFFHGRGKRAPGWAGFFTPKMENRWFIRSIHKAMCDLSKHRGITVIESRPERTSISCPECGHCDPENRSGERFSCKSCGVSLHADFEVATRNLERVALTGKPMPRRENLHSPEGATASRKTRKKPREATASTFLDLRSVLSSAENEGSGPAARAG

SEQ ID NO: 683 - protein, 725 aa, synthetic construct
MLPPSNKIGKSMSLKEFINKRNFKSSIIKQAGKILKKEGEEAVKKYLDDNYVEGYKKRDFPITAKCNIVASNRKIEDFDISKFSSFIQNYVFNLNKDNFEEFSKIKYNRKSFDELYKKIANEIGLEKPNYENIQGEIAVIRNAINIYNGVLKKVENRNKKIQEKNQSKDPPKLLSAFDDNGFLAERPGINETIYGYQSVRLRHLDVEKDKDIIVQLPDIYQKYNKKSTDKISVKKRLNKYNVDEYGKLISKRRKERINKDDAILCVSNFGDDWIIFDARGLLRQTYRYKLKKKGLCIKDLLNLFTGDPIINPTKTDLKEALSLSFKDGIINNRTLKVKNYKKCPELISELIRDKGKVAMISIDLGQTNPISYRLSKFTANNVAYIENGVISEDDIVKMKKWREKSDKLENLIKEEAIASLSDDEQREVRLYENDIADNTKKKILEKFNIREEDLDFSKMSNNTYFIRDCLKNKNIDESEFTFEKNGKKLDPTDACFAREYKNKLSELTRKKINEKIWEIKKNSKEYHKISIYKKETIRYIVNKLIKQSKEKSECDDIIVNIEKLQIGGNFFGGRGKRDPGWNNFFLPKEENRWFINACHKAFSELAPHKGIIVIESDPAYTSQTCPKCENCDKENRNGEKFKCKKCNYEANADIDVATENLEKIAKNGRRLIKNFDQLGERLPGAEMPGGARKRKPSKSLPKNGRGAGVGSEPELINQSPSQVIA

SEQ ID NO: 684 - protein, 718 aa, synthetic construct
VPDKKETPLVALCKKSFPGLRFKKHDSRQAGRILKSKGEGAAVAFLEGKGGTTQPNFKPPVKCNIVAMSRPLEEWPIYKASVVIQKYVYAQSYEEFKATDPGKSEAGLRAWLKATRVDTDGYFNVQGLNLIFQNARATYEGVLKKVENRNSKKVAKIEQRNEHRAERGLPLLTLDEPETALDETGHLRHRPGINCSVFGYQHMKLKPYVPGSIPGVTGYSRDPSTPIAACGVDRLEIPEGQPGYVPPWDRENLSVKKHRRKRASWARSRGGAIDDNMLLAVVRVADDWALLDLRGLLRNTQYRKLLDRSVPVTIESLLNLVTNDPTLSVVKKPGKPVRYTATLIYKQGVVPVVKAKVVKGSYVSKMLDDTTETFSLVGVDLGVNNLIAANALRIRPGKCVERLQAFTLPEQTVEDFFRFRKAYDKHQENLRLAAVRSLTAEQQAEVLALDTFGPEQAKMQVCGHLGLSVDEVPWDKVNSRSSILSDLAKERGVDDTLYMFPFFKGKGKKRKTEIRKRWDVNWAQHFRPQLTSETRKALNEAKWEAERNSSKYHQLSIRKKELSRHCVNYVIRTAEKRAQCGKVIVAVEDLHHSFRRGGKGSRKSGWGGFFAAKQEGRWLMDALFGAFCDLAVHRGYRVIKVDPYNTSRTCPECGHCDKANRDRVNREAFICVCCGYRGNADIDVAAYNIAMVAITGVSLRKAARASVASTPLESLAAE

SEQ ID NO: 685 - protein, 708 aa, synthetic construct
MSKTKELNDYQEALARRLPGVRHQKSVRRAARLVYDRQGEDAMVAFLDGKEVDEPYTLQPPAKCHILAVSRPIEEWPIARVTMAVQEHVYALPVHEVEKSRPETTEGSRSAWFKNSGVSNHGVTHAQTLNAILKNAYNVYNGVIKKVENRNAKKRDSLAAKNKSRERKGLPHFKADPPELATDEQGYLLQPPSPNSSVYLVQQHLRTPQIDLPSGYTGPVVDPRSPIPSLIPIDRLAIPPGQPGYVPLHDREKLTSNKHRRMKLPKSLRAQGALPVCFRVFDDWAVVDGRGLLRHAQYRRLAPKNVSIAELLELYTGDPVIDIKRNLMTFRFAEAVVEVTARKIVEKYHNKYLLKLTEPKGKPVREIGLVSIDLNVQRLIALAIYRVHQTGESQLALSPCLHREILPAKGLGDFDKYKSKFNQLTEEILTAAVQTLTSAQQEEYQRYVEESSHEAKADLCLKYSITPHELAWDKMTSSTQYISRWLRDHGWNASDFTQITKGRKKVERLWSDSRWAQELKPKLSNETRRKLEDAKHDLQRANPEWQRLAKRKQEYSRHLANTVLSMAREYTACETVVIAIENLPMKGGFVDGNGSRESGWDNFFTHKKENRWMIKDIHKALSDLAPNRGVHVLEVNPQYTSQTCPECGHRDKANRDPIQRERFCCTHCGAQRHADLEVATHNIAMVATTGKSLTGKSLAPQRLQEAAE

SEQ ID NO: 686 - protein, 848 aa, synthetic construct
MTPSFGYQMIIVTPIHHASGAWATLRLLFLNPKTSGVMLGMTKTKSAFALMREEVFPGLLFKSADLKMAGRKFAKEGREAAIEYLRGKDEERPANFKPPAKGDIIAQSRPFDQWPIVQVSQAIQKYIFGLTKAEFDATKTLLYGEGNHPTTESRRRWFEATGVPDFGFTSAQGLNAIFSSALARYEGVIQKVENRNEKRLKKLSEKNQRLVEEGHAVEAYVPETAFHTLESLKALSEKSLVPLDDLMDKIDRLAQPPGINPCLYGYQQVAPYIYDPENPRGVVLPDLYLGYCRKPDDPITACPNRLDIPKGQPGYIPEHQRGQLKKHGRVRRFRYTNPQAKARAKAQTAILAVLRIDEDWVVMDLRGLLRNVYFREVAAPGELTARTLLDTFTGCPVLNLRSNVVTFCYDIESKGALHAEYVRKGWATRNKLLDLTKDGQSVALLSVDLGQRHPVAVMISRLKRDDKGDLSEKSIQVVSRTFADQYVDKLKRYRVQYDALRKEIYDAALVSLPPEQQAEIRAYEAFAPGDAKANVLSVMFQGEVSPDELPWDKMNTNTHYISDLYLRRGGDPSRVFFVPQPSTPKKNAKKPPAPRKPVKRTDENVSHMPEFRPHLSNETREAFQKAKWTMERGNVRYAQLSRFLNQIVREANNWLVSEAKKLTQCQTVVWAIEDLHVPFFHGKGKYHETWDGFFRQKKEDRWFVNVFHKAISERAPNKGEYVMEVAPYRTSQRCPVCGFVDADNRHGDHFKCLRCGVELHADLEVATWNIALVAVQGHGIAGPPREQSCGGETAGTARKGKNIKKNKGLADAVTVEAQDSEGGSKKDAGTARNPVYIPSESQVNCPAP

SEQ ID NO: 687 - protein, 781 aa, synthetic construct
MKPKTPKPPKTPVAALIDKHFPGKRFRASYLKSVGKKLKNQGEDVAVRFLTGKDEERPPNFQPPAKSNIVAQSRPIEEWPIHKVSVAVQEYVYGLTVAEKEACSDAGESSSSHAAWFAKTGVENFGYTSVQGLNKIFPPTFNRFDGVIKKVENRNEKKRQKATRINEAKRNKGQSEDPPEAEVKATDDAGYLLQPPGINHSVYGYQSITLCPYTAEKFPTIKLPEEYAGYHSNPDAPIPAGVPDRLAIPEGQPGHVPEEHRAGLSTKKHRRVRQWYAMANWKPKPKRTSKPDYDRLAKARAQGALLIVIRIDEDWVVVDARGLLRNVRWRSLGKREITPNELLDLFTGDPVLDLKRGVVTFTYAEGVVNVCSRSTTKGKQTKVLLDAMTAPRDGKKRQIGMVAVDLGQTNPIAAEYSRVGKNAAGTLEATPLSRSTLPDELLREIALYRKAHDRLEAQLREEAVLKLTAEQQAENARYVETSEEGAKLALANLGVDTSTLPWDAMTGWSTCISDHLINHGGDTSAVFFQTIRKGTKKLETIKRKDSSWADIVRPRLTKETREALNDFLWELKRSHEGYEKLSKRLEELARRAVNHVVQEVKWLTQCQDIVIVIEDLNVRNFHGGGKRGGGWSNFFTVKKENRWFMQALHKAFSDLAAHRGIPVLEVYPARTSITCLGCGHCDPENRDGEAFVCQQCGATFHADLEVATRNIARVALTGEAMPKAPAREQPGGAKKRGTSRRRKLTEVAVKSAEPTIHQAKNQQLNGTSRDPVYKGSELPAL

SEQ ID NO: 688 - protein, 752 aa, synthetic construct
MSDNKMKKLSKEEKPLTPLQILIRKYIDKSQYPSGFKTTIIKQAGVRIKSVKSEQDEINLANWIISKYDPTYIKRDFNPSAKCQIIATSRSVADFDIVKMSNKVQEIFFASSHLDKNVFDIGKSKSDHDSWFERNNVDRGIYTYSNVQGMNLIFSNTKNTYLGVAVKAQNKFSSKMKRIQDINNFRITNHQSPLPIPDEIKIYDDAGFLLNPPGVNPNIFGYQSCLLKPLENKEIISKTSFPEYSRLPADMIEVNYKISNRLKFSNDQKGFIQFKDKLNLFKINSQELFSKRRRLSGQPILLVASFGDDWVVLDGRGLLRQVYYRGIAKPGSITISELLGFFTGDPIVDPIRGVVSLGFKPGVLSQETLKTTSARIFAEKLPNLVLNNNVGLMSIDLGQTNPVSYRLSEITSNMSVEHICSDFLSQDQISSIEKAKTSLDNLEEEIAIKAVDHLSDEDKINFANFSKLNLPEDTRQSLFEKYPELIGSKLDFGSMGSGTSYIADELIKFENKDAFYPSGKKKFDLSFSRDLRKKLSDETRKSYNDALFLEKRTNDKYLKNAKRRKQIVRTVANSLVSKIEELGLTPVINIENLAMSGGFFDGRGKREKGWDNFFKVKKENRWVMKDFHKAFSELSPHHGVIVIESPPYCTSVTCTKCNFCDKKNRNGHKFTCQRCGLDANADLDIATENLEKVAISGKRMPGSERSSDERKVAVARKAKSPKGKAIKGVKCTITDEPALLSANSQDCSQSTS

SEQ ID NO: 689 - protein, 747 aa, synthetic construct
MALSLAEVRERHFKGLRFRSSYLKRAGKILKKEGEAACVAYLTGKDEESPPNFKPPAKCDVVAQSRPFEEWPIVQASVAVQSYVYGLTKEAFEAFNPGTTKQSHEACLAATGIDTCGYSNVQGLNLIFRQAKNRYEGVITKVENRNKKAKKKLTRKNEWRQKNGHSELPEAPEELTFNDEGRLLQPPGINPSLYTYQQISPTPWSPKDSSILPPQYAGYERDPNAPIPFGVAKDRLTIASGCPGYIPEWMRTAGEKTNPRTQKKFMHPGLSTRKNKRMRLPRSVRSAPLGALLVTIHLGEDWLVLDVRGLLRNARWRGVAPKDISTQGLLNLFTGDPVIDTRRGVVTFTYKPETVGIHSRTWLYKGKQTKEVLEKLTQDQTVALVAIDLGQTNPVSAAASRVSRSGENLSIETVDRFFLPDELIKELRLYRMAHDRLEERIREESTLALTEAQQAEVRALEHVVRDDAKNKVCAAFNLDAASLPWDQMTSNTTYLSEAILAQGVSRDQVFFTPNPKKGSKEPVEVMRKDRAWVYAFKAKLSEETRKAKNEALWALKRASPDYARLSKRREELCRRSVNMVINRAKKRTQCQVVIPVLEDLNIGFFHGSGKRLPGWDNFFVAKKENRWLMNGLHKSFSDLAVHRGFYVFEVMPHRTSITCPACGHCDSENRDGEAFVCLSCKRTYHADLDVATHNLTQVAGTGLPMPEREHPGGTKKPGGSRKPESPQTHAPILHRTDYSESADRLGS

SEQ ID NO: 690 - protein, 702 aa, synthetic construct
MIKEQSELSKLIEKYYPGKKFYSNDLKQAGKHLKKSEHLTAKESEELTVEFLKSCKEKLYDFRPPAKALIISTSRPFEEWPIYKASESIQKYIYSLTKEELEKYNISTDKTSQENFFKESLIDNYGFANVSGLNLIFQHTKAIYDGVLKKVNNRNNKILKKYKRKIEEGIEIDSPELEKAIDESGHFINPPGINKNIYCYQQVSPTIFNSFKETKIICPFNYKRNPNDIIQKGVIDRLAIPFGEPGYIPDHQRDKVNKHKKRIRKYYKNNENKNKDAILAKINIGEDWVLFDLRGLLRNAYWRKLIPKQGITPQQLLDMFSGDPVIDPIKNNITFIYKESIIPIHSESIIKTKKSKELLEKLTKDEQIALVSIDLGQTNPVAARFSRLSSDLKPEHVSSSFLPDELKNEICRYREKSDLLEIEIKNKAIKMLSQEQQDEIKLVNDISSEELKNSVCKKYNIDNSKIPWDKMNGFTTFIADEFINNGGDKSLVYFTAKDKKSKKEKLVKLSDKKIANSFKPKISKETREILNKITWDEKISSNEYKKLSKRKLEFARRATNYLINQAKKATRLNNVVLVVEDLNSKFFHGSGKREDGWDNFFIPKKENRWFIQALHKSLTDVSIHRGINVIEVRPERTSITCPKCGCCDKENRKGEDFKCIKCDSVYHADLEVATFNIEKVAITGESMPKPDCERLGGEESIG

SEQ ID NO: 691 - protein, 661 aa, synthetic construct
VAFLDGKEVDEPYTLQPPAKCHILAVSRPIEEWPIARVTMAVQEHVYALPVHEVEKSRPETTEGSRSAWFKNSGVSNHGVTHAQTLNAILKNAYNVYNGVIKKVENRNAKKRDSLAAKNKSRERKGLPHFKADPPELATDEQGYLLQPPSPNSSVYLVQQHLRTPQIDLPSGYTGPVVDPRSPIPSLIPIDRLAIPPGQPGYVPLHDREKLTSNKHRRMKLPKSLRAQGALPVCFRVFDDWAVVDGRGLLRHAQYRRLAPKNVSIAELLELYTGDPVIDIKRNLMTFRFAEAVVEVTARKIVEKYHNKYLLKLTEPKGKPVREIGLVSIDLNVQRLIALAIYRVHQTGESQLALSPCLHREILPAKGLGDFDKYKSKFNQLTEEILTAAVQTLTSAQQEEYQRYVEESSHEAKADLCLKYSITPHELAWDKMTSSTQYISRWLRDHGWNASDFTQITKGRKKVERLWSDSRWAQELKPKLSNETRRKLEDAKHDLQRANPEWQRLAKRKQEYSRHLANTVLSMAREYTACETVVIAIENLPMKGGFVDGNGSRESGWDNFFTHKKENRWMIKDIHKALSDLAPNRGVHVLEVNPQYTSQTCPECGHRDKANRDPIQRERFCCTHCGAQRHADLEVATHNIAMVATTGKSLTGKSLAPQRLQ

SEQ ID NO: 692 - protein, 491 aa, synthetic construct
VLLSDRIQYTDPSAPIPAMTVVDRRKIKKGEPGYVPPFMRKNLSTNKHRRMRLSRGQKEACALPVGLRLPDGKDGWDFIIFDGRALLRACRRLRLEVTSMDDVLDKFTGDPRIQLSPAGETIVTCMLKPQHTGVIQQKLITGKMKDRLVQLTAEAPIAMLTVDLGEHNLVACGAYTVGQRRGKLQSERLEAFLLPEKVLADFEGYRRDSDEHSETLRHEALKALSKRQQREVLDMLRTGADQARESLCYKYGLDLQALPWDKMSSNSTFIAQHLMSLGFGESATHVRYRPKRKASERTILKYDSRFAAEEKIKLTDETRRAWNEAIWECQRASQEFRCLSVRKLQLARAAVNWTLTQAKQRSRCPRVVVVVEDLNVRFMHGGGKRQEGWAGFFKARSEKRWFIQALHKAYTELPTNRGIHVMEVNPARTSITCTKCGYCDPENRYGEDFHCRNPKCKVRGGHVANADLDIATENLARVALSGPMPKAPKLK

SEQ ID NO: 693 - protein, 531 aa, synthetic construct
LEIPEGEPGHVPWFQRMDIPEGQIGHVNKIQRFNFVHGKNSGKVKFSDKTGRVKRYHHSKYKDATKPYKFLEESKKVSALDSILAIITIGDDWVVFDIRGLYRNVFYRELAQKGLTAVQLLDLFTGDPVIDPKKGIITFSYKEGVVPVFSQKIVSRFKSRDTLEKLTSQGPVALLSVDLGQNEPVAARVCSLKNINDKIALDNSCRIPFLDDYKKQIKDYRDSLDELEIKIRLEAINSLDVNQQVEIRDLDVFSADRAKASTVDMFDIDPNLISWDSMSDARFSTQISDLYLKNGGDESRVYFEINNKRIKRSDYNISQLVRPKLSDSTRKNLNDSIWKLKRTSEEYLKLSKRKLELSRAVVNYTIRQSKLLSGINDIVIILEDLDVKKKFNGRGIRDIGWDNFFSSRKENRWFIPAFHKSFSELSSNRGLCVIEVNPAWTSATCPDCGFCSKENRDGINFTCRKCGVSYHADIDVATLNIARVAVLGKPMSGPADRERLGGTKKPRVARSRKDMKRKDISNGTVEVMVTA

SEQ ID NO: 694 - protein, 767 aa, synthetic construct
MSEITDLLKANFKGKTFKSADMRMAGRILKKSGAQAVIKYLSDKGAVDPPDFRPPAKCNIIAQSRPFDEWPICKASMAIQQHIYGLTKNEFDESSPGTSSASHEQWFAKTGVDTHGFTHVQGLNLIFQHAKKRYEGVIKKVENYNEKERKKFEGINERRSKEGMPLLEPRLRTAFGDDGKFAEKPGVNPSIYLYQQTSPRPYDKTKHPYVHAPFELKEITTIPTQDDRLKIPFGAPGHVPEKHRSQLSMAKHKRRRAWYALSQNKPRPPKDGSKGRRSVRDLADLKAASLADAIPLVSRVGFDWVVIDGRGLLRNLRWRKLAHEGMTVEEMLGFFSGDPVIDPRRNVATFIYKAEHATVKSRKPIGGAKRAREELLKATASSDGVIRQVGLISVDLGQTNPVAYEISRMHQANGELVAEHLEYGLLNDEQVNSIQRYRAAWDSMNESFRQKAIESLSMEAQDEIMQASTGAAKRTREAVLTMFGPNATLPWSRMSSNTTCISDALIEVGKEEETNFVTSNGPRKRTDAQWAAYLRPRVNPETRALLNQAVWDLMKRSDEYERLSKRKLEMARQCVNFVVARAEKLTQCNNIGIVLENLVVRNFHGSGRRESGWEGFFEPKRENRWFMQVLHKAFSDLAQHRGVMVFEVHPAYSSQTCPACRYVDPKNRSSEDRERFKCLKCGRSFNADREVATFNIREIARTGVGLPKPDCERSRGVQTTGTARNPGRSLKSNKNPSEPKRVLQSKTRKKITSTETQNEPLATDLKT

SEQ ID NO: 695 - protein, 760 aa, synthetic construct
MTPKTESPLSALCKKHFPGKRFRTNYLKDAGKILKKHGEDAVVAFLSDKQEDEPANFCPPAKVHILAQSRPFEDWPINLASKAIQTYVYGLTADERKTCEPGTSKESHDRWFKETGVDHHGFTSVQGLNLIFKHTLNRYDGVIKKVETRNEKRRSSVVRINEKKAAEGLPLIAAEAEETAFGEDGRLLQPPGVNHSIYCFQQVSPQPYSSKKHPQVVLPHAVQGVDPDAPIPVGRPNRLDIPKGQPGYVPEWQRPHLSMKCKRVRMWYARANWRRKPGRRSVLNEARLKEASAKGALPIVLVIGDDWLVMDARGLLRSVFWRRVAKPGLSLSELLNVTPTGLFSGDPVIDPKRGLVTFTSKLGVVAVHSRKPTRGKKSKDLLLKMTKPTDDGMPRHVGMVAIDLGQTNPVAAEYSRVVQSDAGTLKQEPVSRGVLPDDLLKDVARYRRAYDLTEESIRQEAIALLSEGHRAEVTKLDQTTANETKRLLVDRGVSESLPWEKMSSNTTYISDCLVALGKTDDVFFVPKAKKGKKETGIAVKRKDHGWSKLLRPRTSPEARKALNENQWAVKRASPEYERLSRRKLELGRRCVNHIIQETKRWTQCEDIVVVLEDLNVGFFHGSGKRPDGWDNFFVSKRENRWFIQVLHKAFGDLATHRGTHVIEVHPARTSITCIKCGHCDAGNRDGESFVCLASACGDRRHADLEVATRNVARVAITGERMPPSEQARDVQKAGGARKRKPSARNVKSSYPAVEPAPASP

SEQ ID NO: 696 - protein, 733 aa, synthetic construct
QAVIKYLSDKGAVDPPDFRPPAKCNIIAQSRPFDEWPICKASMAIQQHIYGLTKNEFDESSPGTSSASHEQWFAKTGVDTHGFTHVQGLNLIFQHAKKRYEGVIKKVENYNEKERKKFEGINERRSKEGMPLLEPRLRTAFGDDGKFAEKPGVNPSIYLYQQTSPRPYDKTKHPYVHAPFELKEITTIPTQDDRLKIPFGAPGHVPEKHRSQLSMAKHKRRRAWYALSQNKPRPPKDGSKGRRSVRDLADLKAASLADAIPLVSRVGFDWVVIDGRGLLRNLRWRKLAHEGMTVEEMLGFFSGDPVIDPRRNVATFIYKAEHATVKSRKPIGGAKRAREELLKATASSDGVIRQVGLISVDLGQTNPVAYEISRMHQANGELVAEHLEYGLLNDEQVNSIQRYRAAWDSMNESFRQKAIESLSMEAQDEIMQASTGAAKRTREAVLTMFGPNATLPWSRMSSNTTCISDALIEVGKEEETNFVTSNGPRKRTDAQWAAYLRPRVNPETRALLNQAVWDLMKRSDEYERLSKRKLEMARQCVNFVVARAEKLTQCNNIGIVLENLVVRNFHGSGRRESGWEGFFEPKRENRWFMQVLHKAFSDLAQHRGVMVFEVHPAYSSQTCPACRYVDPKNRSSEDRERFKCLKCGRSFNADREVATFNIREIARTGVGLPKPDCERSRDVQTPGTARKSGRSLKSQDNLSEPKRVLQSKTRKKITSTETQNEPLATDLKT

SEQ ID NO: 697 - protein, 479 aa, synthetic construct
IPSFGYLDRLKIAKGQPGYIPEWQRETINPSKKVRRYWATNHEKIRNAIPLVVFIGDDWVIIDGRGLLRDARRRKLADKNTTIEQLLEMVSNDPVIDSTRGIATLSYVEGVVPVRSFIPIGEKKGREYLEKSTQKESVTLLSVDIGQINPVSCGVYKVSNGCSKIDFLDKFFLDKKHLDAIQKYRTLQDSLEASIVNEALDEIDPSFKKEYQNINSQTSNDVKKSLCTEYNIDPEAISWQDITAHSTLISDYLIDNNITNDVYRTVNKAKYKTNDFGWYKKFSAKLSKEAREALNEKIWELKIASSKYKKLSVRKKEIARTIANDCVKRAETYGDNVVVAMESLTKNNKVMSGRGKRDPGWHNLGQAKVENRWFIQAISSAFEDKATHHGTPVLKVNPAYTSQTCPSCGHCSKDNRSSKDRTIFVCKSCGEKFNADLDVATYNIAHVAFSGKKLSPPSEKSSATKKPRSARKSKKSRKS

SEQ ID NO: 698 - protein, 452 aa, synthetic construct
SPIEKLLNGLLVKITFGNDWIICDARGLLDNVQKGIIHKSYFTNKSSLVDLIDLFTCNPIVNYKNNVVTFCYKEGVVDVKSFTPIKSGPKTQENLIKKLKYSRFQNEKDACVLGVGVDVGVTNPFAINGFKMPVDESSEWVMLNEPLFTIETSQAFREEIMAYQQRTDEMNDQFNQQSIDLLPPEYKVEFDNLPEDINEVAKYNLLHTLNIPNNFLWDKMSNTTQFISDYLIQIGRGTETEKTITTKKGKEKILTIRDVNWFNTFKPKISEETGKARTEIKRDLQKNSDQFQKLAKSREQSCRTWVNNVTEEAKIKSGCPLIIFVIEALVKDNRVFSGKGHRAIGWHNFGKQKNERRWWVQAIHKAFQEQGVNHGYPVILCPPQYTSQTCPKCNHVDRDNRSGEKFKCLKYGWIGNADLDVGAYNIARVAITGKALSKPLEQKKIKKAKNKT

SEQ ID NO: 699 - protein, 425 aa, synthetic construct
LLDNVQKGIIHKSYFTNKSSLVDLIDLFTCNPIVNYKNNVVTFCYKEGVVDVKSFTPIKSGPKTQENLIKKLKYSRFQNEKDACVLGVGVDVGVTNPFAINGFKMPVDESSEWVMLNEPLFTIETSQAFREEIMAYQQRTDEMNDQFNQQSIDLLPPEYKVEFDNLPEDINEVAKYNLLHTLNIPNNFLWDKMSNTTQFISDYLIQIGRGTETEKTITTKKGKEKILTIRDVNWFNTFKPKISEETGKARTEIKRDLQKNSDQFQKLAKSREQSCRTWVNNVTEEAKIKSGCPLIIFVIEALVKDNRVFSGKGHRAIGWHNFGKQKNERRWWVQAIHKAFQEQGVNHGYPVILCPPQYTSQTCPKCNHVDRDNRSGEKFKCLKYGWIGNADLDVGAYNIARVAITGKALSKPLEQKKIKKAKNKT

SEQ ID NO: 700 - protein, 735 aa, synthetic construct
MIKPTVSQFLTPGFKLIRNHSRTAGLKLKNEGEEACKKFVRENEIPKDECPNFQGGPAIANIIAKSREFTEWEIYQSSLAIQEVIFTLPKDKLPEPILKEEWRAQWLSEHGLDTVPYKEAAGLNLIIKNAVNTYKGVQVKVDNKNKNNLAKINRKNEIAKLNGEQEISFEEIKAFDDKGYLLQKPSPNKSIYCYQSVSPKPFITSKYHNVNLPEEYIGYYRKSNEPIVSPYQFDRLRIPIGEPGYVPKWQYTFLSKKENKRRKLSKRIKNVSPILGIICIKKDWCVFDMRGLLRTNHWKKYHKPTDSINDLFDYFTGDPVIDTKANVVRFRYKMENGIVNYKPVREKKGKELLENICDQNGSCKLATVDVGQNNPVAIGLFELKKVNGELTKTLISRHPTPIDFCNKITAYRERYDKLESSIKLDAIKQLTSEQKIEVDNYNNNFTPQNTKQIVCSKLNINPNDLPWDKMISGTHFISEKAQVSNKSEIYFTSTDKGKTKDVMKSDYKWFQDYKPKLSKEVRDALSDIEWRLRRESLEFNKLSKSREQDARQLANWISSMCDVIGIENLVKKNNFFGGSGKREPGWDNFYKPKKENRWWINAIHKALTELSQNKGKRVILLPAMRTSITCPKCKYCDSKNRNGEKFNCLKCGIELNADIDVATENLATVAITAQSMPKPTCERSGDAKKPVRARKAKAPEFHDKLAPSYTVVLREAVKRPAATKKAGQAKKKKEF

SEQ ID NO: 701 - protein, 698 aa, synthetic construct
MIKPTVSQFLTPGFKLIRNHSRTAGLKLKNEGEEACKKFVRENEIPKDECPNFQGGPAIANIIAKSREFTEWEIYQSSLAIQEVIFTLPKDKLPEPILKEEWRAQWLSEHGLDTVPYKEAAGLNLIIKNAVNTYKGVQVKVDNKNKNNLAKINRKNEIAKLNGEQEISFEEIKAFDDKGYLLQKPSPNKSIYCYQSVSPKPFITSKYHNVNLPEEYIGYYRKSNEPIVSPYQFDRLRIPIGEPGYVPKWQYTFLSKKENKRRKLSKRIKNVSPILGIICIKKDWCVFDMRGLLRTNHWKKYHKPTDSINDLFDYFTGDPVIDTKANVVRFRYKMENGIVNYKPVREKKGKELLENICDQNGSCKLATVDVGQNNPVAIGLFELKKVNGELTKTLISRHPTPIDFCNKITAYRERYDKLESSIKLDAIKQLTSEQKIEVDNYNNNFTPQNTKQIVCSKLNINPNDLPWDKMISGTHFISEKAQGSSGDYKWFQDYKPKLSKEVRDALSDIEWRLRRESLEFNKLSKSREQDARQLANWISSMCDVIGIENLVKKNNFFGGSGKREPGWDNFYKPKKENRWWINAIHKALTELSQNKGKRVILLPAMRTSITCPKCKYCDSKNRNGEKFNCLKCGIELNADIDVATENLATVAITAQSMPKPTCERSGDAKKPVRARKAKAPEFHDKLAPSYTVVLREAV

SEQ ID NO: 702 - protein, 704 aa, synthetic construct
MIKPTVSQFLTPGFKLIRNHSRTAGLKLKNEGEEACKKFVRENEIPKDECPNFQGGPAIANIIAKSREFTEWEIYQSSLAIQEVIFTLPKDKLPEPILKEEWRAQWLSEHGLDTVPYKEAAGLNLIIKNAVNTYKGVQVKVDNKNKNNLAKINRKNEIAKLNGEQEISFEEIKAFDDKGYLLQKPSPNKSIYCYQSVSPKPFITSKYHNVNLPEEYIGYYRKSNEPIVSPYQFDRLRIPIGEPGYVPKWQYTFLSKKENKRRKLSKRIKNVSPILGIICIKKDWCVFDMRGLLRTNHWKKYHKPTDSINDLFDYFTGDPVIDTKANVVRFRYKMENGIVNYKPVREKKGKELLENICDQNGSCKLATVDVGQNNPVAIGLFELKKVNGELTKTLISRHPTPIDFCNKITAYRERYDKLESSIKLDAIKQLTSEQKIEVDNYNNNFTPQNTKQIVCSKLNINPNDLPWDKMISGTHFISEKAQVSNKSEGSSGDYKWFQDYKPKLSKEVRDALSDIEWRLRRESLEFNKLSKSREQDARQLANWISSMCDVIGIENLVKKNNFFGGSGKREPGWDNFYKPKKENRWWINAIHKALTELSQNKGKRVILLPAMRTSITCPKCKYCDSKNRNGEKFNCLKCGIELNADIDVATENLATVAITAQSMPKPTCERSGDAKKPVRARKAKAPEFHDKLAPSYTVVLREAV

SEQ ID NO: 703 - DNA, 36 bp, synthetic construct
  source 1..36: mol_type = other DNA
gtttgagaaccttatgaaattacaaggatgccaaac

SEQ ID NO: 704 - DNA, 13 bp, synthetic construct
  source 1..13: mol_type = other DNA
agcagaatacaac

SEQ ID NO: 705 - RNA, 36 nt, synthetic construct
  source 1..36: mol_type = other RNA
gttgtgaatgcaggcatttttgatggtaaatccaac

SEQ ID NO: 706 - RNA, 36 nt, synthetic construct
  source 1..36: mol_type = other RNA
actgtcagacaatgcaaaatgtgtggtacatccaac

SEQ ID NO: 707 - RNA, 33 nt, synthetic construct
  source 1..33: mol_type = other RNA
gttgagctctgcattacgcagatgaatgacgag

SEQ ID NO: 708 - RNA, 32 nt, synthetic construct
  source 1..32: mol_type = other RNA
gatatatcttgtatgcatatgtaggttgtgag

SEQ ID NO: 709 - RNA, 36 nt, synthetic construct
  source 1..36: mol_type = other RNA
ggtggatatcatcttaaaaagtgaggtacatccaac

SEQ ID NO: 710 - RNA, 36 nt, synthetic construct
  source 1..36: mol_type = other RNA
ggtgtgaacgacctttttttgcggtgtaattcgagg

SEQ ID NO: 711 - RNA, 36 nt, synthetic construct
  source 1..36: mol_type = other RNA
gctgtcagtagtagtaaaaatgggggtacatccaac

SEQ ID NO: 712 - RNA, 33 nt, synthetic construct
  source 1..33: mol_type = other RNA
gttgcaacttacgcataggtgtaaaatacgagg

SEQ ID NO: 713 - RNA, 37 nt, synthetic construct
  source 1..37: mol_type = other RNA
gttgcagaacccgaatagacgaatgaaggaatgcaac

SEQ ID NO: 714 - RNA, 32 nt, synthetic construct
  source 1..32: mol_type = other RNA
gatgcaacttagatgcatatgtaagttgtgag

SEQ ID NO: 715 - RNA, 32 nt, synthetic construct
  source 1..32: mol_type = other RNA
gttgcaatgaacgtatgtgcatgaggtgtgag

SEQ ID NO: 716 - RNA, 32 nt, synthetic construct
  source 1..32: mol_type = other RNA
gttgcaatctgcgtacaggcgtaagatgtgag

SEQ ID NO: 717 - RNA, 32 nt, synthetic construct
  source 1..32: mol_type = other RNA
gatcatatctgcttgtatgggtatgctgcgag

SEQ ID NO: 718 - RNA, 32 nt, synthetic construct
  source 1..32: mol_type = other RNA
gttgcagcgtgcgcgagcgtgtggcttgaagg

SEQ ID NO: 719 - RNA, 36 nt, synthetic construct
  source 1..36: mol_type = other RNA
actgtcagtacatgcaaaaatgagggtacatccaac

SEQ ID NO: 720 - RNA, 36 nt, synthetic construct
  source 1..36: mol_type = other RNA
ggtgtatgtaaccgcaatttgaagggtgcatacagg

SEQ ID NO: 721 - RNA, 36 nt, synthetic construct
  source 1..36: mol_type = other RNA
gttgtagtcgacctgaatctgtggggtgcttacagg

SEQ ID NO: 722 - RNA, 36 nt, synthetic construct
  source 1..36: mol_type = other RNA
gctgtaagtcatggaaaaatggtgagtacatccaac

SEQ ID NO: 723 - RNA, 32 nt, synthetic construct
  source 1..32: mol_type = other RNA
gattatatctgcttgtatgggtatactgcgag

SEQ ID NO: 724 - RNA, 32 nt, synthetic construct
  source 1..32: mol_type = other RNA
gttgcaactcgcacgtgaatgcgacttgaagg

SEQ ID NO: 725 - RNA, 36 nt, synthetic construct
  source 1..36: mol_type = other RNA
actgtcagacaatgcaaaatgagtggtacatccaac

SEQ ID NO: 726 - RNA, 36 nt, synthetic construct
  source 1..36: mol_type = other RNA
gctgcatgtcatggcaaaaggaaaggtacatccaac

SEQ ID NO: 727 - RNA, 36 nt, synthetic construct
  source 1..36: mol_type = other RNA
gctgtcagacacctaaaaaatgagggtacatccaac

SEQ ID NO: 728 - RNA, 36 nt, synthetic construct
  source 1..36: mol_type = other RNA
gctgtgagtcacagtaaaaatgaaggtatatccaac

SEQ ID NO: 729 - RNA, 36 nt, synthetic construct
  source 1..36: mol_type = other RNA
gctgtagccctgctcaaattgtagggcgcatgcagg

SEQ ID NO: 730 - RNA, 32 nt, synthetic construct
  source 1..32: mol_type = other RNA
gttgcaacttacgcataggtgtaaaatacgag

SEQ ID NO: 731 - RNA, 36 nt, synthetic construct
  source 1..36: mol_type = other RNA
gatgtatatgctatgattttgtatggtacatccaac

SEQ ID NO: 732 - RNA, 36 nt, synthetic construct
  source 1..36: mol_type = other RNA
gatgtgaacgacctttttttgcggtgtacttcgagg

SEQ ID NO: 733 - RNA, 38 nt, synthetic construct
  source 1..38: mol_type = other RNA
tcagctcacaacctacatatgcatacaagatatatcgt

SEQ ID NO: 734 - RNA, 36 nt, synthetic construct
  source 1..36: mol_type = other RNA
gttggagtcggcttgaatctgcggggtgcttacagg

SEQ ID NO: 735 - RNA, 36 nt, synthetic construct
  source 1..36: mol_type = other RNA
gatgtaaatcatctataaaagaaaggtacatccaac

SEQ ID NO: 736 - RNA, 32 nt, synthetic construct
  source 1..32: mol_type = other RNA
gatgcatctgacacagctgggtgagttgaagg

SEQ ID NO: 737 - RNA, 36 nt, synthetic construct
  source 1..36: mol_type = other RNA
attgtaggcgacctttttttgcgatgtagttcgagg

SEQ ID NO: 738 - RNA, 36 nt, synthetic construct
  source 1..36: mol_type = other RNA
agtgtatgattacctgtagtatgaggtacatccaac

SEQ ID NO: 739 - RNA, 32 nt, synthetic construct
  source 1..32: mol_type = other RNA
gttgcaattcgtatgcgcaggtaagtttcgag

SEQ ID NO: 740 - RNA, 33 nt, synthetic construct
  source 1..33: mol_type = other RNA
cgttgcagctcgcacgttggcactggttgaagg

SEQ ID NO: 741 - RNA, 34 nt, synthetic construct
  source 1..34: mol_type = other RNA
cgttgcagctcgcacgttggcactgggttgaagg

SEQ ID NO: 742 - RNA, 36 nt, synthetic construct
  source 1..36: mol_type = other RNA
gatagttttaacttccatttgaaatgtaaatgcaac

SEQ ID NO: 743 - RNA, 32 nt, synthetic construct
  source 1..32: mol_type = other RNA
gctgcaacacgcgcgggtacgcgggttgaagg

SEQ ID NO: 744 - RNA, 32 nt, synthetic construct
  source 1..32: mol_type = other RNA
gttgcaactcacgcgcgtatgtggcttgaagg

SEQ ID NO: 745 - RNA, 36 nt, synthetic construct
  source 1..36: mol_type = other RNA
aatgtgaacgaccttcttttgcggtgtacttcgagg

SEQ ID NO: 746 - RNA, 32 nt, synthetic construct
  source 1..32: mol_type = other RNA
gttgcaattcatatctccgggtggattgaagg

SEQ ID NO: 747 - RNA, 36 nt, synthetic construct
  source 1..36: mol_type = other RNA
gttggaatcgaccttaatttgaggtgtgcttacagg

SEQ ID NO: 748 - RNA, 36 nt, synthetic construct
  source 1..36: mol_type = other RNA
gttgcgtttgcccgtgatttcgggtgtgtatacagg

SEQ ID NO: 749 - RNA, 32 nt, synthetic construct
  source 1..32: mol_type = other RNA
gatgcaactcgtgtgtatgtgcgagttgaagg

SEQ ID NO: 750 - RNA, 36 nt, synthetic construct
  source 1..36: mol_type = other RNA
gctgttagaacatacaaaatgaaaggtacatccaac

SEQ ID NO: 751 - RNA, 36 nt, synthetic construct
  source 1..36: mol_type = other RNA
ggcgtatgtctacctgaaaaagaaggtatatccaac

SEQ ID NO: 752 - RNA, 36 nt, synthetic construct
  source 1..36: mol_type = other RNA
ggtgtatgtgcaccatatatgtaggtgacatacagc

SEQ ID NO: 753 - RNA, 36 nt, synthetic construct
  source 1..36: mol_type = other RNA
gctgaaagagcagagaatttgttgtgtgcatacagg

SEQ ID NO: 754 - RNA, 32 nt, synthetic construct
  source 1..32: mol_type = other RNA
gacgcaactcgcgcgcgggcatgtattgaggg

SEQ ID NO: 755 - RNA, 32 nt, synthetic construct
  source 1..32: mol_type = other RNA
gttgcaacacatgtatgtgggtgagttgaagg

SEQ ID NO: 756 - RNA, 36 nt, synthetic construct
  source 1..36: mol_type = other RNA
gctgcactgcaccgcccattgatggtgtgctctagg

SEQ ID NO: 757 - RNA, 32 nt, synthetic construct
  source 1..32: mol_type = other RNA
gttgcaactcgcacgttggcactgattgaagg

SEQ ID NO: 758 - RNA, 36 nt, synthetic construct
  source 1..36: mol_type = other RNA
gttgtaagagacccgaattttagctgtgtatacagg

SEQ ID NO: 759 - RNA, 32 nt, synthetic construct
  source 1..32: mol_type = other RNA
gttgcaatttgtatacgagtgtgacttgaagg

SEQ ID NO: 760 - RNA, 36 nt, synthetic construct
  source 1..36: mol_type = other RNA
gatgtgaacgacctttttttgcggtgtgcttcgagg

SEQ ID NO: 761 - RNA, 36 nt, synthetic construct
  source 1..36: mol_type = other RNA
ggagagatctcaaacgattgctcgattagtcgagac

SEQ ID NO: 762 - RNA, 36 nt, synthetic construct
  source 1..36: mol_type = other RNA
gtcggaacgctcaacgattgcccctcacgaggggac

SEQ ID NO: 763 - RNA, 36 nt, synthetic construct
  source 1..36: mol_type = other RNA
accaaaacgactattgattgcccagtacgctgggac

SEQ ID NO: 764 - RNA, 37 nt, synthetic construct
  source 1..37: mol_type = other RNA
ggatccaatcctttttgattgcccaattcgttgggac

SEQ ID NO: 765 - RNA, 36 nt, synthetic construct
  source 1..36: mol_type = other RNA
ggatctgaggatcattattgctcgttacgacgagac

SEQ ID NO: 766 - RNA, 36 nt, synthetic construct
  source 1..36: mol_type = other RNA
gtctcagcgtactgagcaatcaaaaggtttcgcagg

SEQ ID NO: 767 - RNA, 36 nt, synthetic construct
  source 1..36: mol_type = other RNA
gtagaagacctcgctgattgctcggtgcgccgagac

SEQ ID NO: 768 - RNA, 36 nt, synthetic construct
  source 1..36: mol_type = other RNA
atggcaacagactctcattgcgcggtacgccgcgac

SEQ ID NO: 769 - RNA, 34 nt, synthetic construct
  source 1..34: mol_type = other RNA
gtcgctctctaacgcttgcccagtacgctgggac

SEQ ID NO: 770 - RNA, 37 nt, synthetic construct
  source 1..37: mol_type = other RNA
ggttgaaccctcaacagattgctcggtaagccgagac

SEQ ID NO: 771 - RNA, 36 nt, synthetic construct
  source 1..36: mol_type = other RNA
cttgaaatcctgtcagattgctcccttcggggagac

SEQ ID NO: 772 - RNA, 36 nt, synthetic construct
  source 1..36: mol_type = other RNA
gctggaagactcaatgatggctccttacgaggagac

SEQ ID NO: 773 - RNA, 36 nt, synthetic construct
  source 1..36: mol_type = other RNA
ctaggaacgcacgcagattgctcggtacgccgagac

SEQ ID NO: 774 - RNA, 36 nt, synthetic construct
  source 1..36: mol_type = other RNA
attgcaacgcctaaagattgctcgatacgtcgagac

SEQ ID NO: 775 - RNA, 36 nt, synthetic construct
  source 1..36: mol_type = other RNA
gttcggcraycctttgattgctcagtacgctgagac

SEQ ID NO: 776 - RNA, 36 nt, synthetic construct
  source 1..36: mol_type = other RNA
gttgaacctagatcagatggctcagtacgctgagac

SEQ ID NO: 777 - RNA, 36 nt, synthetic construct
  source 1..36: mol_type = other RNA
ccctcaacacgtcagaaatgcccggcacgccgggac

SEQ ID NO: 778 - RNA, 36 nt, synthetic construct
  source 1..36: mol_type = other RNA
gtcgcaagactcgaataattgcccctctatggggac

SEQ ID NO: 779 - RNA, 37 nt, synthetic construct
  source 1..37: mol_type = other RNA
gctggggaccgatcctgattgctcgctgcggcgagac

SEQ ID NO: 780 - RNA, 36 nt, synthetic construct
  source 1..36: mol_type = other RNA
ctctcaatggataacgattgctctctacggagagac

SEQ ID NO: 781 - RNA, 36 nt, synthetic construct
  source 1..36: mol_type = other RNA
gttgaaccctcaacagattgctcggtaagccgagac

SEQ ID NO: 782 - RNA, 36 nt, synthetic construct
  source 1..36: mol_type = other RNA
actgaaaccaccaacgattgcgctcctcggagcgac

SEQ ID NO: 783 - RNA, 13 nt, synthetic construct
  source 1..13: mol_type = other RNA
aggtacatccaac

SEQ ID NO: 784 - RNA, 13 nt, synthetic construct
  source 1..13: mol_type = other RNA
tggtacatccaac

SEQ ID NO: 785 - RNA, 17 nt, synthetic construct
  source 1..17: mol_type = other RNA
tgcggtgtaattcgagg

SEQ ID NO: 786 - RNA, 14 nt, synthetic construct
  source 1..14: mol_type = other RNA
aaggttgatacagc

SEQ ID NO: 787 - RNA, 13 nt, synthetic construct
  source 1..13: mol_type = other RNA
gagcacatccaac

SEQ ID NO: 788 - RNA, 13 nt, synthetic construct
  source 1..13: mol_type = other RNA
gggtacatccaac

SEQ ID NO: 789 - RNA, 13 nt, synthetic construct
  source 1..13: mol_type = other RNA
aggtatatccaac

SEQ ID NO: 790 - RNA, 13 nt, synthetic construct
  source 1..13: mol_type = other RNA
ggctacatacagc

SEQ ID NO: 791 - skipped

SEQ ID NO: 792 - RNA, 17 nt, synthetic construct
  source 1..17: mol_type = other RNA
aaaacaaggattgaaac

SEQ ID NO: 793 - RNA, 36 nt, synthetic construct
  source 1..36: mol_type = other RNA
gctgcaagagctcctaatttgaggggtgcatacagg

SEQ ID NO: 794 - RNA, 10 nt, synthetic construct
  source 1..10: mol_type = other RNA
tggtacatcc

SEQ ID NO: 795 - RNA, 65 nt, synthetic construct
  source 1..65: mol_type = other RNA
tggggcagttggttgcccttagcctgaggcatttattgcactcgggaagtaccattacatccaac

SEQ ID NO: 796 - RNA, 23 nt, synthetic construct
  source 1..23: mol_type = other RNA
tggtacatccaactctaggcgcc

SEQ ID NO: 797 - RNA, 15 nt, synthetic construct
  source 1..15: mol_type = other RNA
aatggtacatccaac

SEQ ID NO: 798 - RNA, 20 nt, synthetic construct
  source 1..20: mol_type = other RNA
tggtacatccaactctaggc

SEQ ID NO: 799 - RNA, 22 nt, synthetic construct
  source 1..22: mol_type = other RNA
tggtacatccaactctaggcgc

SEQ ID NO: 800 - RNA, 21 nt, synthetic construct
  source 1..21: mol_type = other RNA
tggtacatccaactctaggcg

SEQ ID NO: 801 - RNA, 19 nt, synthetic construct
  source 1..19: mol_type = other RNA
tggtacatccaactctagg

SEQ ID NO: 802 - RNA, 16 nt, synthetic construct
  source 1..16: mol_type = other RNA
aaatggtacatccaac

SEQ ID NO: 803 - RNA, 16 nt, synthetic construct
  source 1..16: mol_type = other RNA
tggtacatccaactct

SEQ ID NO: 804 - RNA, 15 nt, synthetic construct
  source 1..15: mol_type = other RNA
tggtacatccaactc

SEQ ID NO: 805 - RNA, 14 nt, synthetic construct
  source 1..14: mol_type = other RNA
tggtacatccaact

SEQ ID NO: 806 - RNA, 18 nt, synthetic construct
  source 1..18: mol_type = other RNA
tggtacatccaactctag

SEQ ID NO: 807 - RNA, 13 nt, synthetic construct
  source 1..13: mol_type = other RNA
tggtatatccaac

SEQ ID NO: 808 - RNA, 17 nt, synthetic construct
  source 1..17: mol_type = other RNA
tggtacatccaactcta

SEQ ID NO: 809 - RNA, 14 nt, synthetic construct
  source 1..14: mol_type = other RNA
atggtacatccaac

SEQ ID NO: 810 - RNA, 12 nt, synthetic construct
  source 1..12: mol_type = other RNA
tggtacatccaa

SEQ ID NO: 811 - RNA, 11 nt, synthetic construct
  source 1..11: mol_type = other RNA
tggtacatcca

SEQ ID NO: 812-814 - skipped (3 entries)

SEQ ID NO: 815 - RNA, 17 nt, synthetic construct
  source 1..17: mol_type = other RNA
caggcgtaagatgtgag

SEQ ID NO: 816 - RNA, 17 nt, synthetic construct
  source 1..17: mol_type = other RNA
cgtacgtggattgaaac

SEQ ID NO: 817 - RNA, 17 nt, synthetic construct
  source 1..17: mol_type = other RNA
catatgtaggttgtgag

SEQ ID NO: 818 - RNA, 13 nt, synthetic construct
  source 1..13: mol_type = other RNA
catgaggtgtgag

SEQ ID NO: 819 - RNA, 13 nt, synthetic construct
  source 1..13: mol_type = other RNA
cactggttgaagg

SEQ ID NO: 820 - RNA, 17 nt, synthetic construct
  source 1..17: mol_type = other RNA
agcgtgtggcttgaagg

SEQ ID NO: 821 - RNA, 18 nt, synthetic construct
  source 1..18: mol_type = other RNA
atggtgagtacatccaac

SEQ ID NO: 822 - RNA, 13 nt, synthetic construct
  source 1..13: mol_type = other RNA
atgtagttcgagg

SEQ ID NO: 823 - RNA, 13 nt, synthetic construct
  source 1..13: mol_type = other RNA
atgtaaatgcaac

SEQ ID NO: 824 - RNA, 17 nt, synthetic construct
  source 1..17: mol_type = other RNA
agaagaaggattgggac

SEQ ID NO: 825 - RNA, 13 nt, synthetic construct
  source 1..13: mol_type = other RNA
tgtaggttgtgag

SEQ ID NO: 826 - RNA, 13 nt, synthetic construct
  source 1..13: mol_type = other RNA
tgtggcttgaagg

SEQ ID NO: 827 - RNA, 17 nt, synthetic construct
  source 1..17: mol_type = other RNA
tgtggggtgcttacagg

SEQ ID NO: 828 - RNA, 17 nt, synthetic construct
  source 1..17: mol_type = other RNA
tgtgcatgaggtgtgag

SEQ ID NO: 829 - RNA, 17 nt, synthetic construct
  source 1..17: mol_type = other RNA
ttggcactggttgaagg

SEQ ID NO: 830 - RNA, 17 nt, synthetic construct
  source 1..17: mol_type = other RNA
tgaatgcgacttgaagg

SEQ ID NO: 831 - RNA, 17 nt, synthetic construct
  source 1..17: mol_type = other RNA
tatgggtatgctgcgag

SEQ ID NO: 832 - RNA, 18 nt, synthetic construct
  source 1..18: mol_type = other RNA
ttgcggtgtacttcgagg

SEQ ID NO: 833 - RNA, 13 nt, synthetic construct
  source 1..13: mol_type = other RNA
gtgtacttcgagg

SEQ ID NO: 834 - RNA, 12 nt, synthetic construct
  source 1..12: mol_type = other RNA
ggtacatccaac

SEQ ID NO: 835 - RNA, 17 nt, synthetic construct
  source 1..17: mol_type = other RNA
gctgggtgagttgaagg

SEQ ID NO: 836 - DNA, 105148 bp, Homo sapiens
  source 1..105148: mol_type = genomic DNA
ccaacaggtcttccctaatttccagggaacgtctgcagaaaggcgagagggggctgctggctcctgggtgtgcgccttggccggcggcgcctggggagcgcggcggtgacccgaggcggtcatctcaccaccgtggtctccccgctgctcctgcgagcctgtcgctctctctccattcccattttctctttccctgggtaacagcacaggaacagttgtgctctgcccgtaagaaacattttcttcccatccctctgtgcttttgcagttgctctggagtgggagggggtgtgtccctcccagggacccggctcggggacctcccgcggcgccgtgagcacattcccagggactgggactcccgggactgcccgcgctttgtcctcggcctctcagagaggtggacgcctcggtgcctctcttgcccaggcccccggcgctcccctccgggggccagactctggctcctcgttctttattcctcgggctctctttctgcgacccttaggagccggggactcggcgctttcagttgcattcagacccagtcgcttggcggggcgctcagattcccggtccctggctcggccttgggggcgccctcgggccccggcctgcgccgcctgcctctccccggtcccctctttccaggccgcgcgggctcctggagacttgggcgctgcccttccggacccgcagccctccaaacttaggctggattccgcgttgccgtgcgctccctcccacctcccctcgcccgctgcggagctgtaacttggaggctcagctctcaacttcgggtgatttttctttgctgtcctctcctcgggcaaagtttcccgagcgcagccgcgggctcggggcttttacttcggcccctggcgtccacacgcggggagcgagcgcggcggcggcggggaggggaagtgggtgtgcgtacggaggagggtgtccgggagcaactctacctggcttccctccgcccgcgcttccccagcccggggctgcagcctcccggtgcactctcgctctatttttttcttttttgaataatctttcattttagagtccgcgtgtgtgggggggagcagggcgcacgtcttgctcccccccaccctttcctcccacccctgccacccctttcttctctcccggccacgccaccgccgcggcgctcgctgcggccactggtgagcccgcggccccagcgccccctcccctcggcccgcccctcccccgggggccgcgtctggcgtccgcggagccccccgccccgcacctccccctccccgcactggccattggcttgtcctggtctctttttcatgtccagcccctgatgtgtgtccattggtgtgagcttccccttccctcctccccttctctcctgctcgccctgcccatgttttgtgtgtctctgtccatccagactcctgacgttcaagttcgcagggacgtcacgtccgcacttgaacttgcagctcaggggggcttttgccatttttttcatctctctctctctctctccctctatctctcttctctctctctccctctttttttttttttttttttttttttttttgcttaaaaaaaagccatgacggctctcccacaattcatcttccctgcgccatctttgtattatttctaatttattttggatgtcaaaaggcactgatgaagatattttctctggagtctccttctttctaacccggctctcccgatgtgaaccgagccgtcgtccgcccgccgccgccgccgccgccgccgccgcccgccccgcagcccaccatgtctcgccgcaagcaaggcaaaccccagcacttaagcaaacgggaattctcgcgtaagtaacccaataatagtaataataattattaataatcacgagagcgcgcaggactagaagcaaaagcgagggggagagaggggtgtgtgcatgcatttttaaatttttcacgagaaaaacctccgagagtcgaggtaaaagagataaagggggaaaaaaccctcatcccatctggaaccattgccgtgtatgcacttttgagacagcacgcaccttttaattttatttaattttacaaaaatttgactcctcctctttcctcctttccgccgctttatttctcttttcgaaaaggaatgcaatgattccactccccccccgccccgccagttttgcaaaataatgaacaatgctaaggttgcgaacaactcacatgcaaacctgggggtgggagctggtggggaaagggaggttgcttcccactcaccgtaagaaaatgggggggtagggagggagtgagtacaagtctaaaaaacgattcccggggagaaaagaggtgagactggcttttggacaccagcgcgctcacggtcaagtgtgcagcgggaggaaagtagtcatccccacaatagtgagaaagtggcactgtggaaaggggcccccggcgctcctgagtccgcggagtcgggagaggggccgcggcgacggggagagccgtgggaccgggaaggacgggagacgcggccggcactgccgccttttgttccggccagaggtgggtgtttgtcccgctgccttttgtgccggctcctcgcgcttgccctcccgcgccgccgccgccgccgccgccgaagggcaggagctagggccgggggaggaggcggccgggggcacgcgggagagggagggagggagcccggactgctgcctcctgggttgccgctgccctcccctcccgaccgaacctcagaggcagcaaggagaagactggcacataaataaataaatacataaaaataaaataaataaaacaaggcaagagaatgtacaatttcttgcccccaaaccgaagccaaacgctctgccaacccttttctgtgacggccttctctttgactcccccaccagcccccctgcaaaaatctcacaatctctcatctagaaaaaaatttacaatcaccctcttcccccaaaccccttcagttgcaaacttagggcgccgacggcacggagagggagagaggaactccctcctcttactattttttggaagattttcaaaaaaagtggaagtggattttgattgggaaaaatctcgtgtctgaatgtttacaagcaccgcgtgtgcgggagcctcctgccaacaaacagacagaggaccgagcgcggcgcggcagccccggagcaggcggcggcggcggcctggcctcgcccgggccttgcccgacctcgccgcgccccagcccagccccggatcgcccacccggcgcccggcgcccacccgccaggcacggcggcaggccacgcagtgtctccgcgccagcctggcccgtggtcctggtccgcccccagcacaatgccgagacctcttctcgacctcccagactgcgaaatcggctgggtgaaactcggctttgcaaagcatttttattttgcagggcaactgtaaaagcgcgttctgcgcctcccctcccctccgccctgggtactttctcagacgtctcttgtccacagctcgggaccgcgaggaggtcaccacgtgctttccctgcccaccccccaccccgcccggtctggtcaccagtccccctgcgccccgagcacgactaggccaggtggcggggttgccggggaagggcaggggagaagtgtgtttgagtgtgcattttaagggcgctggatcctgggaccccgagcacttcaccctttgggtcttgccctcttccccaggcctggcttggtctgaggttcttgtgagtctgtataagagctggtggtggtggctgtctcccgctgactgcgcctggaaaggcgggcggtgggcacttaggaaagtttggcagcaagggaaagaaaggcgtgagggcccacattccccccctactcaatttatgattcttactttaaatttttgatgcagttttaaaggaccacctatacttggttctgtgtttttttaaaggggtggtggtggggggtgcgcacagggaatttaatttttcactgggccctggaacttgtcacacacttcggaagctcccccaccccggcacgttgcgcggccctccctctccccaccccctcgcatccctccctcgccgctctcccccgcccccaactcccccggccgcgccggatgcggatcagacgcggcgcgcggcggtgtgaagttacagcccggccaggtaccggcgggaaggaagggcagtgttcgcaggactcgggaaagtcaggcccttcttcggaaggatgcagtgggggctcaaaggacagaccggggcgcgcagtccaggctgctccctcgtacccctctccctcctgggtccatcttgggacactctaggctgggagggttagtaccccctcctcctgtcccggggttaaagggccagtttgggagggggtgagggggccacttctttctgtcctcattttctgggtgctcagagggggcaggagccatcccggtcctcagtaccacccccccgccccccgcctctgctatgtgggctgaatgagccattcggtcgctaggaggcagaacaagatcaagaaagctcagcgaacttgaacctgtaccagagcctcccccacctcctgcccggcgattctcgtccggggaggaacgagctttgcgagggtgggggtggggggaaagaacggttaggcagaattccctttctctcccccatcaccccgtatgtctttgttcttcattttgactttaaaaatgcttctggccggggccgcggagaagcgaccgggcgcgcggccgacacccccgtgcgcgagctgagaccagcgcgcgccgggctcggagcacggtgcagttttcgctttctttcggggccggcatttttggtagggaggaaccgggagtgcgcgctctagggcttcggggcatggccgaagagggggatatggcaagtttgcacttggtctccagcctcacttcttccaccccctcacccccatgcaaagcacagacctcggtggcctcggctggcttgctgggcggctctgcagcccgacaccccccctctcgcctcggagctcggaatcacaacaatagtaatagttatcatcataatgatgcgggcaggcagcgtcattaataatgaataaccgcagccgccgccgcgcacacccagtgcccagaattgcgggggaaatgcatttgcagagatcccccaaagtaaaaagtgtaagcttgtggacacagaatgaatctcaggacccgcgcttgaggtgtgtgcggagatactgagactgcaccaggttaaccagccgggttttccaaacctcacttcctttttcaccaactggcaggcccagggaaccgtcaccccgcggccgagctggccgagctggacgggcatggaggcagcagtcagggcccctggctgccctccgtctccgggcccccgggccccaaggccccgcggccgctgctgcacgtgttcgcagcaagcgcggcgggagcctgcagccagcacgctgctcgctttgtgcctcagagtccccgcgcccaacttcactttctgcacggtccacccttgccggggcccctgccccgggcctgtagcccccggctttgcttttgtttctttgcttttcctctctgaatttcagcctccgtttgcttctttaccctgttaagacaatcaaggagaaggacttggaaagcaaacttgaagacacatctccctttccccctccccctccgctccccggcagctctcgttttgctcgctccttaccaacatttcctataaggattatttttttcccttaaatttattcttttgcaactacacagagaggaaagagatctcagtctgtcactgagacattgagacgttccaggctgtcttgctgtttgaacgtagaagcattttattttctatttcttcctcccctcgtagagagaattcgcggctaattattatgattatttgcccactcccttccacttcaatcgaggactccctgctttgtagccggagtttaggccggagcttagaaatgttggtattgttggggcgaaggaggatggagttgaattgagggagggggtaaatggctgagggttaggaaggtttttagggaaaggggaatttgcattaaaatgcagagaaattatcagatgcccagaaaggaaatgttgattgccactgagaaaagatgtcaatgcaaatcagtagactacaccatgagaattgtattttcatattttctttgtgtcccactttgtctgatttttaataatataccagcaatgataaaaacacgttttggtatttctctgaacaccactagccaaatgttttgcaaggagaccgatgttaaacgtatttcatacattagaatataattcttgttaattagcaataatttacgttaagagcatagaaaatgttgaggttacaggttttatatctgtacatttgatcatcttgttattttcaagaactttgcctcctataaaattaattaggtgaaatgtggaggtgtaatcagcaacctctgaattaccacttcatttcccggttttgattgtaaatcagttcagtcactacatttagaagactttaaccaagtctgttttgaaccacattacctttaactatttgatacctaggagaatatttccttttgcacctaaataatattcccacttttagaaatgtgtcagaccttgggaacaaaaaaaaaaaaaaaagaatcttaacggtggaaataaaaaatttttttttttgcaaaggttctatgtactagtaagtttgataaaatattttcctaagtcttccttcagtctgtaaacctcagaacttgtagctaatgctaaacaaaaaagccacatttatcaatgtgtacttaaaatccttaattcagacaacaggaatattttgagaatgagttccctattcctcacttggtcaaaatggaagcaaatgtaagagaagaatgacattaaggcacaatgcagaggcacttctgtttgtcttcttttatttgaaaagtatgcatatgtattctgtatttatcttttggccagtatgttgggcaaagaaacataagtgcttactttactgtctttattagtaggaatataaccttcatattcctgtggtgaccttatgttaaattaggaggagtaccagaggctagaaattatgagatgtcctacttgagcacaggtgcagctaggcagggctctctcaatattatttcacctagcacatctgggagttactccagatcttccccctcaatattcagcctgggtagggttgaaataaatttaacctgagttcactggatttttgcactttatcaaaatctgttccaatattctacactcaaattaaaatctattttttgattctctgtggctttaagttcattaaatgtaaaattggcagcttgctaaagaaggtcagactgattaactgtttaagacttgtacattttctgcttcagttttattaactggcagcatcctggatgttttgtattttgtgattttttttttttttttgatagagcaagcataagatttcacaagcagagacttaccaactctcttttcccctttggaagcttaaaaaatgatagaagctggtaaagtagatgctggagtattttagtacaaagttaaaaaaaaaagcaaacaggaaagaaagacatgtctaccttgttataccatccgctggtgattatgtgtgcagaaatagtctcataatgaagcattttggagctcattcagaaaattagtccactttgacaacattaggcgaagtatttcaagtctaaagaaaggacttctcagccttgctctgaaatgtggtgtttgcttgaccattctgatttttatatcatagatgccaccaagtgcaaacatgtttagaatattataggcattccatttctcagaataaaaaaaaaatgactaattggcttattttcttaagtactcaaaagtatcccatttagctaatgtgtctgagaaatactgcccgtgcatttggtatttctttgattttgtggcactgctgagagtgagagcagaaaggtttttggcagtgtgaattatgctgcgacatgattattatttagatccgtttcataggtgcatgcagtcgttttcttattacagcagtgtaaatgtggcacatttttcatgtgacatagtagctttctaatttatgaagccatgtctgtttacttaggagtatatacattcacacacaaagggtgtgtgtgtttattcacctctcctttcattctttggcacaatggacaacttggtgtataggaaaaaagaaacaaatttggtttctatccacttttttttttaaccagtttttcttgtagttattatttaagctttctttatgttccctgtgttaactatttaagtagcattctttctaaacttacaaaccagacacatttgttgctgtgggtgtgtgcatgggtatatgtgtgtgtgtgtgttctctggagttatgcaaggaagactgttttctttacatatgtgatgatttgcctcattgacaaatttgctctctggttgataaccttcacatccttgtactttttgtatgctcacattttctgggtattatatagagaagcctagaaacactttacatgatgtggtgggatggcatggggttgagatgtgcttctcccctttctgtcctctctggcactctaataattgtgcttttgtttctccaaccacagccgagcctcttgaagccattcttacagatgatgaaccagaccacggcccgttgggagctccagaaggggatcatgacctcctcacctgtgggcagtgccagatgaacttcccattgggggacattcttatttttatcgagcacaaacggaaacaatgcaatggcagcctctgcttagaaaaagctgtggataagccaccttccccttcaccaatcgagatgaaaaaagcatccaatcccgtggaggttggcatccaggtcacgccagaggatgacgattgtttatcaacgtcatctagaggaatttgccccaaacaggaacacatagcaggtaaatgagaagcaaggagaaaagctgtttgcatgttttcttttcattttcagaggtgctgtagccaagcagtaaggagttgtgaagtgctttctctattactctatgtgactgtccatgacagccctgtaatgttaaaataatcatttctgttgcttacgtccagaacacagaaaaataaatattttccacctcactgaatcagatgtaggcaggataggtacacacatcagacaccttctctctggatctgtcgattttggatttcttttcttccccatccccaccttctcattttgaagtattgagctttactacacctagtccagcttccattgtccatttccagccttggtgacgtgtcagaggcaaagtggccatataggcatttgcagttcagccaatgacttgtttgactcagaacatctggccaggcctccttaggggttcagctcgttctcaaggcttccctgaagtagagtgggctggcagggtagttggaggtggtggaaagagttaactgagcttcagggctagccttggatccatattggctgtcagcccggatggggctgtaattaaacacagccccgtggtgggatgacaccatgaccttgactttaagatgccattttcgactggccaggccagagtagagagggcagttgctgaagcgcacagacatgcttactcgaaaagtttaagggcatgttggaaatttcaaaaggttggtttgacaggaacggctgctccctgcagcctgcctcctcagctaaatgataaatgcttctctgtgctctctcttgtctctgatgtggttttgacagatgtatcttgattttgtttgtggtttacacagccacatgtcacccttacaaatgtccagtccagactccactgtttctgctataacacaatgtaaaaattttcttggaaaaatacacacacgtattcaacagccctccctcctttggttaattttagcagggaggcagctaggtgtgtgggtttctcggcagctcaagggaaaaggaattaaaggctagcagtgggacttaaattcccttctctaagtgataaacagtaacactatatagtgaccctcaaaacattttttgcttgagcatgttagacaaaagtcaatgcagattctgtgatgacagacatgccatgcctgttggtggatcgctttcttccatctacctaccacccagctcccgaaaggcaagaggtttgttcagttttaggaaaggtagtgcatatcatgaattgattcactggaacttgtctctccgacctagtttgaccacaaagttgaaccataataggtcagtggtctagaggggattaaatgtcatattatttctcctctccccctctagaatttgatcattaaaaccaaacatggcattttctttctttttttagtgctttctgtgatagcactcagatactttccctttagtgaaatgggaaatctgctgctagggaagctgcatttgtggagtgtatttcttgaatccaccacatttaccttatgtgacatgtaggtgaagattttatctcccctaccccccagcaggatgtgggaatgaccatttccatgtgttgtcttgtgactggaaggaaaatgaacagaagtgtaaggcatgattaatgaagcaagagcaggcggaaggggatttgtcgtcttcggagatccaaagccttgctaaatcaccaaatatggagtaacacttgcgtgatgtaacatcgtatttacatatcgagctgctcgtttaaaagacaaaacacagtgtctgtcaagcaagaattaaaaccacacttcttactgaggtcccaaataggttattcagtcttagattaaccagctcaaaaattctgtgcctctgtatttagaggaggaatctaaatgctggggggaaggccttacatatagttaagacttttactgctatagttgtgaatctatgtagggaaataagagatatttgcttgaactccctggttgtctaaaggttctgttattatttttttaaagaacaagtataatagcagagcctagagaagccaaaaccaaaagcaaatttaaaatatattttatagcgctaataatcaatcatttaactgagacgaaaagctctctaagatgtctaagatattcaatgggcgcacaacaagtgctgtgacccaggtgaggtaaacctttcgtgcatgaataattacaaagtcttgatttctttcattgtgtttaatcacctgttcccaccctggaactggctgaacataaatagtgtggtcacatctcaaagtgagatgtcagtaactagaatcacgacttctcataattcacagtaatgaattaagagtttcctatggtgaagttaacattctaccattgcacataaattccgacgctctggccctcaggtgcccctgaagcgaagttctggaagacggctgtgtgtgtacccccagcccatttctctaaagcacgtctgcacaattccaagtctgcttttctttttatgatgaggaaggaaacaataacagtaatcattcagtagatatttgaattgtgtcacaaaaagaaaggagaagcaatgccttgtattaaggaaagagatatattgatgaatctctagaagaatgtgtttggcaaccacataaaaggtagtcatttaagcgtgctgggtaggaaaggctttattaaagtgatgtaagttggatttgagttcactgtgagcctgtactattttataggcaggaagcaagaataaaacagtgacagatcttcttcctaagataaataaagcttagaattcgggactttcagataggagaataaggcagagttctttaaatcttgagtaaaatggtatgcattttcactgtactcaggcctctccaagctgagttttttttttttttttttttttttagacagagttttgctcttgttgcccaggctggagtgcagtggcatgattttggctcactgcaacctctgcctcctaggttcaagcgattctcctgcctcagcctcccaagtagctgggattacaggcgtgtgccactacgcccagctagttttttgtattttcagtagaggcagggtttcaccatgttggccaggctggtcttgaactcctgacctcaggtgatccacctggcttggcctcccaaagtgctgggattacaggcttgagcgaccgcacctggcccaaactgagtattttttagaggattctttttacctggtgaatagatgggtatgtgctcccccacttcatccacgtacacatatgagctgtacacatagatgttaatcaggttgcttttttcattttatttaaatattcaaaatattgtgtgattgtgatccattgagatcattgaagtagtattaatttagctgggaattagcagcttatgttgtgtgggcccagttcatcaatatgtgtgtcaaatatccaccctcagatatcagcagcctttgacttgcagtcagagctttcaataggggttttgttttgttttgttttctttttttttagtctcatattttatgatggggggaaatattcatggaagattactgaatgtgaaactgctgttcccttatagaaaagacccaaacattatcccatcatgtcagatttgaggttttggcttattgcacataggaatctttaaattaggtttgggctgtcataaagttagctttttgagagactagagaaaaaatatgacaagtcctataaaatgtagtaaagtctgctcctgttgatatataacattttttctctttaaaatcatgaacatagacatttatatcagggtatttaaaattatttgcctagacagtatagctggtatttagataatgatatatcagacagatactctaaagaagggagatatagtaattcaaaatggaaatacattagcatgctcttaaaagtaaatcaaatacaatatgcttttcagaatttagaaaatgaacttaccttttctttttgtatccattctgattctctcctagctcagactgaactggaggatgtatttgtgtaccttatggtgtaattgtaaatgagactataaattatagtatgctattatgactacttatttttcttttctctttatttatgtgattctgaataaaaacgactgacttctgaagtgaattttcagcatggcagttaaaacaaaaaaacaccactaccacaaaaaacaatatactggtgaacattttacttaccttcaaaatccagagagtagagaatattgttttctaataagtacctaggattttcatagggagcctatgtttgtgaggccactatccaaagactaatgttcatgaaactgggagtcctatatacaagctgtatttgtaaataagacagagaaaggttgtgaactggcagcttggatgttttgtcaaagtacaatgtcagagaaactctttctaagacaaattgtaaatagaactgtcacagtgattgcatgattgagccgcagaagtgtcctacaattgttggcattgtcaggacttttgaaagcttaattaaacacagtggcccgcatggctgctaaacttactaaggaaagccaaaaggaaaaaaaaaatatatctaaaatgtagaagatcctaaagatcccaaacttcttcagacattacccttgtggtgacacagaaaagatgcattgtgcattttcctagtcatcttttataaataatgttttgagaataggtccacgtgatatgaagatcatcctgtgtgtgatgtggagattgtgttagtttttctgtctcctgctgttacagacagttaatgtaaaaatggccttttattggaaacacaaatatgtattcacttcaagaacaggagcagagggggacaaagtttccctcccgttctctgtgtttattctgtgaaagcttaaaaaaacaaaaaaacaaaataaccacacacacacacacacacacacacacacacacacacacacacacaaaaccagtgctgtaatttcttaaatcaccccattccttgttgtgttgcaagttgtgcctttactataaaggatctgaaatatgttttgcacacctttctcttagtgaatgtggcatataattgtggagctgcacatgggctggaaaatgcaactgggtgtagaaacgtgcaggcagggtcaggacaggcaaccttcagctcagggaggaggcgagttggatgcttattaatggcatcttttagagtcctggaaaatcattaatttcacactgcagcttccatgtagtttggctaatgtgggagtactaaattggggtacataaaaaacatgcaaatcctagggaaacattttttagatttttgtgatttctcaatgaaaatgtttaataaaggagaataggtgaatggtggctttgcgtgctggtcagtaagaaaggaaacaaattttggctttcctttggggggaaatattaaatttaaccgaagtagaaagcacagctagggagatgcaccaagattgcgtcactggatgttaatttaatctactttggttggtctgttcacaccctttattgcacaaagaagtcatttgacaaaatttaccccaagcccaagtctgtttttacatacagtagtaccagctttgtgcaataaaaagcacttagcatcaagctggacccagcctggcaccttgccacttttttagcatgagatttaatcaccaagcatctttagtacctttctgcttgttcagatttcatttgggtcatggctatgtcagcagtgttgttatttcaaggattaaaaaaaaagattctaacttagagcccacttttaacattatttcaaatcaagcaggtttttatgttatgtatcaatttggatgacattaatgaagttcataaaatatgttcagactatataatttaatggataatgactactatttttatttgtaatacaaataggaaattgactgttgtctccctccctccttggttcttttctcctacctaggtaaatgggcatccttaaacagcttctcccctttacgaccagggtatagagcactggccaatatcagtaaatttacctttgtaatttgccacgtagtttttacaacatgacctaattaatttgagcacgaaccatattattgctactggagtcattttctgtcacaaacttaatttccaggaaatgtaacctgacaaataagaattctttagctctctacatgtgctcctagagaccaaaggcagatttaaaataataataattttaaaagtgccagcattattaaagccagtatacttgatgccaaactcaatttgaagccagtaaacatcagactgtatttctaatcagttttaaaatgtaacttattccatattgggttcattggaatttgtctccctgctttttactggccagctgcactccctatgcatttttaaaacatttcagcaaaggcttttgctgttcttagcagggttagtaacttggggtctatttctgagctcattcgtcattctgcaatggcattgagttaggttggcaagggaaggatttgaggcatggggggtggtgaggtcacttctgatcccagcagggaataggtgagcttcatttgcctttacaataggcgcacagttactgcaccttggaggagctctcaggtgccgctcagatgggcgcatgtaaatgccctgtcagatgcggagctggaatattaatgcttcttccaccaccacaccataataaagctgtacacagcaagcttaatatgcagctagtctggggaattgtataaacttagatagcccagtgtgaaagacagcaatggaaaaatgctcgatatgccacagtttccattcttgttctcctttgatctatagcgaaatgaaaacatcatccttttcttctcttggagttgtctccccaactctgccacctcccaattcaccaccagaatttttttgcatgtgctggtatggagaaatgcaacataatttgtttcatatggttaattacaggcgtttgaatatttaaaattttaaatagccacagttccagcttttcccgttaaaagtatgtgatttgaacaaagggagtacagtgtaaatatttgtggtgatttgcaacacccctctttccccattacacacacacacacacacacacacacacacacacacacacacacagagagagagagagagagagacattcagtttaaatctagtactgatctaaaggacttctgtaccttcatttgtactttttttaaaaaacaactttcaactggaattccattaaaatatttcaccattatatttttgagtccacattgcttgaggttttaaagaagatttttataatgtgttcctttaacagaatcaacagctgtcagaagcagttgtggtagatccacaaaacgtataaagaaaaatacacgtttcctgaaacaaaacacttggaaaaataagctgctaagaactggcgaattagaagtttgcagacagggaactgaagtgtcatctcttggttcaccctggagactgatgtgagtggatctgatgcaatgctgctggaagatttacctgcacaggttgctcctctaaggcaacgcgcagtgcacgattgacgtatgcaccagagctaggctgggcctcagctcgctccatcttttgccctttttgatctctttagatagataaaataccaagttctcagagtgctaaacaacaaattatatatacctaaaggtgagatgatcaggtttaaacttcctgtaaaagaggcgagaaggcgccttgcacacccttttccagatagggctggcagcatgttattcagaactgaatcagtctctgccagagaattcccagtgggaacctggagcaggtatgttgatgaaggggatacctggggacctttggtcactcacaatgagtttttgtttgtattctcactgttgttagcattgccaatgaacaattgcacctacaatttgattttagttttagatagaggcgaatccactgattaaaaactcccattaaaataaagaatggaattattgtgaaacctgcaagggtgccttcaaaaagaaaaccagtgctgttgtatacctacctcgcctttctatttgctttttgaactttctaaaaaacacaaggaagctttttgctaagcatcagggcatttaaatttatattcatcagttgttcattttcttaatatgtaatgatgcataaaaaggctgcaaggaaatcacatctgttaatttttagggaaataaagtgtagcttggattcttatgttggagcacaaagcactatgtgccaagtctgttcctgtacattttaaatatagagttttaatatttggccaatccctgcacctcctcaaacaaaaacaaacctcaaaaaactaagagaaccaaacctgaagtattctccttcaccaactcaaggtataccatgattttatgatttatttacatttaggggggaacccctcagtgaaccatttactccccattttaactcccctgccccgatcctttcagtttccagttaaaacaatgcattaaccaatgttaaatcttaaatctcgtgagtttctctccatcacaccctaatattttaaaaaaattattcctttacatttaaaactgaacattggctactgaagaatgatttaaaggctgaaaaaaattttaataataaatcgtaaccttctcatgttatgtttttgttatgttaaggagaaaaaaatcaataaggaaaaatttaattctgataaagatactcttggatctttgaaaacaactgctgtccttttaactaaaacatttgagcagcttcaaagactatgtatttcttctgatcttggagctgtgtgactggtagcaagaaagaaaaaaaatcttattctacatacaagtggattgcttaacaagtcagcacagacacgtacttgtttgtacaatagagataaaaattcctgtataaaaataattcagctgctgacagcaggcattgttgttggacctgtcttttgtgcttgtcccagctctgggtccccctcccctcctatctgcttggggcagcctgctgcctgcacactgctgaccagaagttaattgctatatattaagtatataggtattgtatttaaagaggaatatctcaaggcttcctatatgcattccactttactttctgatgtgattgcggtgttgccagcaggggggtggcaggcaaacgctctaatagggaaaatcacttgaaggcagttaggggaaatttggccttcaagtcccatttgctctgtagtgtagcattggtttctaaacttttgtttttaatctaattctgatttgccctgtcacatcccatatcaaccctcattgaactctactcatgtagagtaacattagtgtcaaacggaattggtcaggactgtggacctgtggctcatacagatggttgtggatgtgggttccatgcagctctgcatcctatcctttctaataaatgttaaaatgtggcacatttctgagcagggcccaaggataagagagttaagaaatcagggggtagtacctgagatttttctcccttctctttccgatttccttgataacatccacatttccggtaagatcaactctaggagaaagtctgaggctgggggagagagggggagaagggtgcggagagaggttcttggaatattcttcgatagcagttcaaatgaaatccccacagcagagagcttttgggtctagcagtggagcggtaagctgggacacgtggcctttcgaagctgttattctcagtctgacttgcacaccagctgagataggacttaacatatactttcttgctttcacctgggttggagaggttggggttgggaggaagaggaggagttcattgggaattctgtcactagaattttttaaatgtcaggaggttagcaaggtgtgagttagcattcaagcaaaggattcttctccagactagtaattggaaagcctgcaaatccaggttcccacgatactctctaataactggggtgggatggtggtggtgggtggacaccacaactttctgaatgtcagctgatgtctgcatgacccgttcaccatggattaaatgcggctggtgccgaatggaggaaatcagaaaggcaaatctcaagcaacaggatttgcactcctcagaagtaaaccagaccttgctcctctccctcctgtgcttctcctttcttgctggtttccctttggaagcagaaacttctaaaattaatgccactccaagccaatgaaaaagctgtttttataccacagtggatgtttacacaggagagacaacttgagggggaaaaggctttttggaagggtggagggactcgtgttaatctgttctgttggaggactatgcagtattgcctatgagcgactctgggctgtttttgataaattaccatgtttagagataggtttggctcttaagggcttagttttatgaacaaagtccgtgacgatgtttgcagcctctgtttgtatcttagcccctttggcttgactagaagctctatgtttagtttaagctcagtctggaagatattacaattttgcattaaaaaaatgaggaaatcataggaagaaaaaccctttgctttttggatgaatcttactgataatttgctaaagctcatttgaattttaagcacttctttaatcttcaaaggctaaattgctttatgaatatgcatggtgtgggcagacttcagttcattacctagttgtaaattctaatgaccattaggtccttccagtaattgcgaattgttttgcatttttgattggcctattaacatgtacattcggtgcacatcaggctggcctgtcagcctgctgaaggagaaaaaaaaggtgaaaattgtttatagcaccaagattcttagattttcaatcttgcaaaattgatgatgtaaaaaaattaaagcagtgttttttcttctcaagattaaaagttcaccaagagatttgacatatttaatttacatgatgactttgcactccttcattaatgtaatttgcatatgaagctgttgttaatcacttttgatcatgttttgtgtattagctgcctcagtggctctcctcctcagatgccccagtagaaaggagcaaaatgatgcatcttcttgccaagtttcctttagtgaattgaggaattagaagtctaaccttgagtaattacatatgttttatccgttttcttttaacgttaagtacagtttgtgaacgtgttggctggaaatcgttctcatttggggagaagactgtaaaatttaagtatatgattgaggcacttccagatacatagagaaatatgtattgcctgtttctgttccccacgaacattgcagggcagttttattgttagcagtttgatggcaggaagccttggctattatagtgtattaagacatcaggttcctcctttggaggagggaaggctacagaactacaaacctttctaacaatgctttaggtttcttctttagatagatggctggcacctaaaggacttgggcctgggtttggctgactcttttatcttttagatcaagtaagttttctcattcagctgctgctctgagctacaatgtgtcctcccctcatcaccaaagtatatcctggtctccaggctccctgggctcccagtgtctccctcaaggtacacgagtgccctggtggtgaaaacaaggtgctaactaacggtttccgatttttgagagcctgtgattttggtgtttgcctttgctgttgaataacctgtgctgtattattgatgttcatctttggtttatgagtttatcactggttaacaagcagaatcagaacagtgtaactgatattctgattaaaacgaatgtttaatgaaagaaaataaattgtgatggaaaatgaacagtgtgtaagaaacataactataattttaacctccgagggacctagcactgccctaccgtgacttccatccataccatgctaaaagcatgcttcagtttaaagttgttaatattcagctgggaaacagtatccagaacacaaataaattattaagtgcatgaactttttaggcagtaagatgaactgatggggtccatctgtgagatccaggggctttttatttgtgtgtgtcgagcgattctgccctctccgacttcacagcctttggtctccggccaactgcatgcataattgattccacacgcactatcattttcttgatgtaattgctttactaagatatgatgaaatctaatggataatttgctatttgaaaatggtcaaaaaaaatcttcatactttatgtggggctgagtgggcagtggagaaaggggtattcagctgacccggtatttaagaaaacaaaacaagcaacactaacttatgcatgctgcttcagtcgcgttggctgtggataggaaggtctttgtgacatatggaagccagtgtataaatctctctccttctatcttgcatcacccccttcattccttctctctttctctcctctctctctcccccaaactttacaagaaagggatcctaacaaggtaaaaagtaaacaatttagtcatcacaagccttattattcagtctatccaggagttttgccatgtcggtttatttaacttccaggaatgtaaacactgacacagccctagaagcagcaagaaagattacagtattagagttaaaaacgtgagcatggaggagctgtgctttatactctgctataataacactttacattgaaacataatggtaagtcaaaagtgactggaaacttctgcttatatggagtacaaatttcattctaatagattggcataatctagtgtacccagggtagattgttatataatggagaaactgtataaatgtcaagtacacaaataattctacaggaagtaaataaaaagtattagaatttcttaagtcaccattaaattttggtggtgggacaatctcattagctccttcaaaatcatgtggctttgcataagtcttttgaaaatgtattttcagggaatttacagatggtgaaacattgttttaatccaaaccagttaatgctttaaatctacctttaaaaaaattgtactgtttttcgaagtacttaaagggagtggaggggtagaaagcatataagtgaatccatctcactgtggcaaactgtttttcaagtaaagtcataataatgaacaacacatgatctgaaatttgatcagcaaacatatccttatgccaaggaattttctttttttctttccttttttttctttttcgccattcacataccaaggttctgtaaatcagtaaaccaggcagagagtaactattgtaagggggaaaccaaatcataatacccagagtggcccagaagctgtctttctgaagaaacattaacgccaccaccaccaaaaaaagaaaaacaaaaaaacaaaaaacaaagcaaaacaaaacaaaacctttttaaaaaactggaaatgacagaatagttttaaaaggaaaaaaaaaaaaacccaaaaaccaaaaagcaacaaccaccttctgacgctcaaaacttcaaactattaatagaccaccagtgagatagactgtctttgtgccttgaaatgcaaaatgagggaaataattagcagaggaacaaaattctcaaaatttgaagaacttctgtgattactgggggtacagtgaaaagaaaatgcaaatttcttcctgatcttaattagattcgattgtgcggtgggtgtgttggatttggggggaggggcagaggcagggagtgctggggtgaggcgtgaggctgagtgttgtggagacaggttagcaggggcccggcggtgtggcaggaacaaaggcagcttccaacgctggtgcaggattccgagccttaacccagatgctcatggtgccctagtcttgagttcttcatttaggtgggcttatttcccactgggtctgggggatttcatttgtcctttgaggggcagggtggacactgacagaacagctgcggccggcagagagggtggttaggaagagggaagcagcctgtgggtaacttcccgaccacatggaaaggctgaataagacgttatggaccctgccttgggtactggggtcagcgtctcctggtggtgtctgcacagggccccccaatgccagggcactgccaaaacacgctcttgagtttaatggtagtggttggtctgagtcctgccaaagtgtatggagcaagtttcattggctggactttccccttgcatgaaataataaaagccctggccaaggcttatgaatctatttttgtttcattaatattatttattatgtattttattaatattttttggagggaccttgctctcatttgaccatttgtagttataattaatgcattccgtactggttgtaaaaagtgtgcttgcatttaattgcaagtcagggtaaattaatggatatgatttaaaacaaaactcacttaaaatattcttgcagaacgcaaaggagggggcagtcccagtatttaatttattttctggtttagtgttagtgtgagagggtcgaaaagattctgtgggtccaacgggatttgtgtctgtgtgtgcaggaccgtcgggcaacacagagggaggagaaaaacctggaccggagtagggtagccaggagctctttttttttttttctctaatttctgaggttgccaggaggggcttaagcaaagtggtcaagtccatctgctccggagaaggtggtaaagaaaagaggttagtggcaagagggaaggagcacaaagggaaaattgtacattgggagcgttactctccctggccatggtgtagccagactggtttagcagacagaatgatagattgttttgtcaggggtcccagggtgcgccctgaacttgaagcactttgtttatcttgaatagaaagggaaaagcgcagacataatcgatgtctagtttttaggagctcgaaagaggtaggagaacagagaagactcaggaggggtagtgggaggtgggggaggtgcaggccctggttgtggttgtccattaacagatgaacttggccgagggccaggctttagatgagagcgtgtcagggccccagtgcagccaagccttttcagtgttttttttttcctttttctttctttcttttttaaatacctgctgactgtacatcaaatgctccctggtcttttggctaaaggcaaaaaaataaaaaataaaaaaaaaaagagacgcacagctcaattttttccctcctctgaaccagttgaggccagtcttttggctacatatgcgggttctatcatctttcctggcttgccgttgggaaaaaaagttgtgataacgccagtaacccgagggccagatgggaagggtttggttgtgttcaggcgaccaggtgtgagagctcgtggtgcagtggggtggggcgtggccggcgtgcctgcgtgtgcaggtaagaaatcagtggaaactcttttttttttttttttttaaatggctgaagtttaacttgttggaagggcctgtgaattaagctgtcggtggctgagaacgataatatgcaaggaaggctcaaggaaggctcaagaaaggccaggggtggggaaaaggtgctcttgttagaggcgcagcctttcctgggcaggacccaggaccgatggcaaacccatgtgtttgggcttgttttgttctcgattttcttatcttcttggcctcttcctgtgttttttagtttattgtgacattatgcattcatatatgaatgttggcaagcaggagtcatcatcccaataacttcctgacatttttagctcttttaatgtgcagtctttgccctcctgccacaagtggcgaagtaattgaatttccctgttactaactggcaggaggcatgttctagttcccaccagaggagctgctggggctaaagctgggttcatagaatcccacctaggggacaccagggctttcaagtggtttggggacctgtctgaaatgatattcacacaataaaaaatatttttcccatcatagacttgaaaaggcaccattgtgcacatctatataaaatgtgataaaatcacatttacttcccctggctaggcctcataagggaggcaggatttccttctccttttctagtagcaaataaaaactgggaaaatttgggggcctctgggtttatcccatggatacctgcccccgctcccgcccgccaactcagccaagcccttagaggcagtcttctctcccacctagatgtctttgtaacctgagctggtaagaaagggaggagggacagaaagaggggaaatatgcccttgacatatgatgtatcttctttcttttcttcttctctttgattacacgaaataaaatggtttaggctgagggtaaagaagtaataccatttctagttgtgcaaccttgggcagatttcattccctaagcctccgcttcctcaatctgtaaagtggggagaatcacggggcttgcctcatagggcctttgagcatcctatgagagcatgtgggggcgctgggctcagtgctgggcacatggtaaaacatgtcacaaaagctcattactattacggttatgactcatggcttggaactgtgtgctcctggggtctcaaagtagttcccccattatggggtgagcaggttgggatgagagaagagcagggcaggtgggggtctaaagagctcagggtctcattatgtttctggtggcagctccctcgtgggtgggagtcccctctccccatagacgtgtgttgccttacgagaggcttgtgcctgcctgggtgtgtgacacagttactctgggttcagatttctatgttactgctagctggttgggagagtctgagggaatcatttcacctctctgtgaaatggagataactcaaggtcccttacctcatagagtccatgtgagaagtaaatgagggaaagcacagacattactcgctccgggggctgcacctccagaattgctgttgtcattattaccatgtgtctgacacattgatattccatcccacaacaacctcggaaaggaaacactcccattagcctcatttggtagaggaggaaattggggttcatcaagggttaaatgacttccctgagggtccacagttgttcaatcctttggcctgcggccgccaccctctgctacctcttcagtacgtttgcagctttcttcagcggtgccaggcaacaactgggcaggaagctctggtgctggacagttgtccctcccatgggttctgtggtcaagtttttcaatcttctgggaaagagaagaatgttcccctccagttctgggcatattgaaggagcacggagctgttgggaaaagttgcaatgtaaggaatcctgctttgcaagtagtcatttccccatctgtccagaatgagcctgaaatcaagtgagggtcctgagaaacagagggaggaggttttactgtttgtgtgtggcttggtcaggagactgcagtgggctgaatgagaaactaagctcggacttttaagaagtggtgaggcttggcctgcagcagttctgtgtgttgtctctgtggcatttacttctcggatcgtaccttcaaaggctggggagaatcagaattatacagggagggagagactgagtgtgagtgagtgtgcgtggcagtggtgtttcttaggacgatgggttctggggggtcataatctgcttcgaggaggttttcatttctggctgaacaaggctgtggtaaggcaagtccggaaggcatgctggaaacttgagggaagttttgaatggaaactgcagtcaacagctccatatgatccgcatgtggcttccccagaggcaagttttcagctgcgtggtggcctctcccagtcactccacaggctgccctgacgctattaatatttgctgaagcaagacctgaggttcgttgcagatggattacacaatgtattccaaaaccaaatgttactgttttcctgtattctccatcctttcaaattggccaggctaacatagacctccactgagagaatttcagaatcatttggtagttgagaagcgcctacttcatgcggaggccccgtgggaggagtggaagagttggcctcagcactggcgagtatcggatgggagctctgctcacttggtaagtccttctgctagaaccaagggaggctgttcagatccatcacaaagaagttgtcggtcacatccaggttgtcttctgagtttgaggtgggatggaggtggctgctgagaatccatgtgggtcaagagctccaaagcttcacttttacttcgcactctgtcccggggcatggacgtcctcaatggaggtcatgcaagcccttccccctcaccccttctcttggccctcttcattgtctctacatacccttgggtcaagagtgtagtggttctcccttgtcaccctggaagagaagctcttagttttatttgctgggtctcctagactgaaatgataaagctgaaatgataaaaggcgtatcatggctttagaacccttcttatttccctcgctcgcaccccctagttttccttctcttcccttgaaaatcagtgaaaatcaggccacatctctgatgatggccttttgtttctttttctttttctgtttctgccttcgttaggtaagcacaaatttgatgtcccaagaggcaggccggtgacccttcaggccaagtgcctggatgtggcaaagctacaataaatatcgaatggtgagagcaatggaaatttagcaaagccataaccggggagacctcagaggggcagtggactggttaagaggctgttggatgagccgggtagtatttctacttcaacctgattgaaatgtcgactaaaaatcaatgctgttgactagtgataatttacaacgttcctggtgctaagtagttccccgcttaagaatgcgttggctgggcagagattagcgcagggagttgtgtgtgtcacaatgaatcagacgcattataggtcagccctttatttgtttcatcatgacttttacacagttgtcatgtaatttatggctgctttcacgttgtcaaacattttcattgcatcttcttctttaacaccctcctgacatagacacactgcacttgaaggcttggtattgtttcataatccgagaggaggcctataaaccatcaaattacactatctttgggctaatctaaatgcgctgcagattaaaatcagagctcatttgtccctgatgcaaattattaagttctaattataaatacccatttaattacccgacacatttttattttgcggacccttttgagcactgctgtctgcgatgcagagggggtggggggagatgcataggagacaatctgcagtaattaatgtacacttcccaaatggtaaaggataaacatatgctgctttgtttgtcttatttatttattgattagatgtatagagactttggcgtgggcacaatctgaagttgaaatccttttaaagatgaaaactatttaaaaatcttttggggaagaaagagcaaaatatagccaaccaatagctttctgctagaacacatcatcccaaaatatgggattctgaatttgatcaaatcaccagtttctgaatttgatcaaatctagattttgcagaagttcagggtgagagaaaccatgcctgttttatatctagaaagtgaaatcattgttatagaaaaaacctactgtggttagaaaaaaaccacattcttttttcccagccctgctgccatcctctaccagaaaataacagtatctgcctgtagtatgaagaccttccaattgagagcattatgataaactatttttgattaccaaacacgaatgaaggaagaagataacataaaaattagtaaaggccttccaagtagacatttacccttctgtgaaagccatggagaaattaccaagactggtttggggggagggcatttaaggtcttttgggcattacagattttccagaaccaaactttgacttttagtgttaacagagagacactgatctgaaaaccaggacacctgggttctgacccttattgtatcatgctgtgagattttgggctcccttcacctgttagcatttgtttccttgtcttgtaaagtaggtaaaatagatagtttggactgggtgggtctctaagtccccatgatgttctagcatagtatgaacaccactgaccagttttctccctgctattttttggaatctagttgctgaatggggctcacctgcaaagacagcagaatattattttcttgatttgcctcaaagatggaagctatggtggagattaaggcttggattcgtgattccccaacagaaagcttaaaggcatctttcaaattgctggaagcaaaattgaagtgcagtataatggaatggtgataattcacagaagtttccagccttataagatttctccatcttttaattgttgcaagctgttttttttgaaaaactccaaagaatgtaatgtgtattttctccaagtttgcttttttgggcaaatgtaactacatcaaaatagaagtacgtttttgaaaaagaaatagttgaattcaaacaaccaggtattttaaattcaattaactgactgaattcagtgatattttcctccttcctcctcccaaaagctggtttctctgtatggacatagcctacatatgctgagtccctggagttaggaatttttgcttgttaaaggcatccgatgcaacatgtttagaagaactctccctctgttagtgttgaagacagcataaattgagggaaaatgttctttttttattcatcatgtaggtaaaagcatatggcctgttctgggacatgcgatctttgcaatccattttttaaacttggtgtttaccattggcttttagcacggatgtttctgttttccacactgtccagcaaataccatttatatgtggcattgaatgagatatgaaatgttttcagaagcatgctgaaaaagggcattcaaagttatcctttggataatgatgatctaaaactttcttttattatcccatgtgctcagagtaaggggcaaatgaatcagttgtgaaatatgtgttccttgtaggacacaggcactcttgagatctatagcttcaataaaaaggtaatttatttaaattactgcctctttaatttataatgttttggggatttttaataggcatgctctgtaagggcactggtaatcagctgtttctgattttgcatgctcttctatctctggtaacaaaataaaatcttaaaaaacaagaaaaaagaaaaaaaaacaaaaacaaaaacaaggaacataaagtttagccctaacccaacccaaaagcaaataacaggccgaatgaatggcagccccccagaggctctactttccccttccattattacctgaaataaaagcatgataacattcatgccagagataggtgacaaaattatgtattcagacatgaagtttaggatttcatagcccaatgttctctcttctcccccacctcttattgtgttgtgcaaatgtatcagccgttgtattgttaatgcatgataggaagctgccgctaggacagtcttggctcactaatgcggtcagctgtgtcacaatgtgatatatagattatatttaccatggcatattttgtttgcgaaatgggagcggatgataaatgaagataccctccagttttcacactagttcctgtggtccggagtctctcaaacaataaagcacccctgataatggagaggtatttatgggaacataattgacttcaaagttttagatctctggctgaagtttaagatgggatagtccattacattaatgtctgtgcttaaagctcctatttggcttaaataaattatttagggtttactgcttaaaccttggtcaattcttgaacgtttgggctagttaagtaattttccagtgactttctgtgccttggtgattcatttacttgattgagctcctgtgtgctcgtatgatttctaaatgtatttctcaagttttgcctggcaatgaatgattttgcttactggagtcttgtgtggtacacctataaaaggcttattaactctttttgaaaaaaaaaaaaatccccaaacacatcaacactgtcatcataagataaagcatatatacatatgcatctatatacacacatacatatgtacatactacatatatacatacgtatatgcatgtatgaatatatatatagttgtgtgcctgtgtgtgtgtagaaagggagagagagagaataggaaagtctttagaattcaccatgattccatcaaatcaatatagaagtttttgaaagctatccatgtagaaaccacttttcatcaaaatctgacttaagcaaattatctccatactatttatctgaaagtctgttgttcacatagcgctggattgaggatcatagtggcaaatttaggagcaacagtcccaagcaggaatcctggatggcaggctgtcctttgtgcctcccctgagttgagaagactggtgtttattctttctctaggttgcaacacgtgttgccttgaaatctcccttctttacggttctgccatgagtgtattttctgtgacctgcctctgcatctggttaaatggacttcagtaatctgtacacagttacttcttacttattttatatcctgaaagatattaagtccaacaagcttttacccacagagtctacagagaaaacggccaggcaatttttgtttcaatctctgtgtctctctggagcactagttccagaggctgatcaataggttttattgtagacctcactgtctctaaaagcattttgaccttatcctgtctaaaaatagtatttgctcttgcctgcagaaccttgacctgtgaaaacccatttggaacataactgacatatctagtcagctgtatatccaagacatgctctgtgaatgaattctgtgcagaaccgtccaggagaacactttcttccaagacaaatgaattccagttctgaacactgggagtgcacctgcttgtcggatgtggtgatgggccacatggtggggagtgagggagactcagggcctgtggggcagtcgatgtgggaggactgtcacagagactctcagagggtgcattcagccctgaacagggcaaaggactgcaaggggcaggagcttgggctgacatgcaaggtggctttacacaaggccctttttagagagtgtgattctctgaagcttttcttggcagcttcagtcttgaacctcactggaagggatcctccaaaacatgacccagatggaaagaagtatttctgagtttaaaataactcccctatttggtaatacgggactttatttgtgactttattatttttaggtgtgataatggttttgcagttgtatttaaaagaaaaaaaacgagttcctatgtttaaaaaatacatacagaggtgtttactgatgaaatgatatgacgtctgggatcaacttaaataataaaatgggctagggaggcgatagggttacagaagacaagaatgactgtgagctgtggtggttggagctggaagatgtggacttggggactgatttataacattctctctacttttgtagtatttgagatttttccagaaaataaaggtattgcctgactggtggagagcagtatggccttgtttagtcggtgttgtttcttcaccaagggtttggctcagaggtagcaaggggacaagtgtcctatgggcaagaaagtacctgtgagctcaagtcttgtatctgggaagttcattgtgaaggggtcatttaagggtctgtactgtgcactgtcccccattctcctggaagaacagagatcccttgtctttttcagtgcatgaggcagagtcagatgtggcgtttgcttgagtttcagcacaggtgcctctgtgcctcgtggtgagggtcaggaagaagcagctgggacgtgctcacgtggctggtagtgttatgaagacaaggctttgggacctttctttggccatttgagccctggctattagagaaagatgatttgcctgagaggagattgaccacactctcagaaagaaggggacaaagaacacgtcaagggttaagcagccttccctttaagggaggactggggcacaagatggaagatgaaagggagcagagtggcaattgcagagctggaaaggggaattttgttcttctagatagcaaaagccaggactgtcgctgtgtgacttgaaagctaggtcactggtgggcttcgtgcagcccgtcacaggggagccatggtgggcctcgtctctgccgtatctgctgcctggaagctgagactggcctaaccacatcacaccattcccagacccaggcccaggcccaggcccgggtccctctggttttacaaaatgtccgctctctctcgcttcacacagaggctattattagcaagtgtcactcagttatctgagagtggcgcttttagctgccatctaagtgcctgatacttgggtttacagcagattaaattaaattttaggctggtttggcttcactggcagtagacaatggaaggcagctgttgtagaaatgtaacctggcaccctcaaggatttgtgtgagtgtgtgtgtgtgtgtgtgtgtgagtgtgtgtgtgtgtgtgtgtgtgtgtgtgtgtgctgaccactaggctacacttccttttcctttcctctccatttcatccctttccaaaaagtgtttagacaaatagtttcccagacttggttttatcatgctgggttgacaaaggttgtgtacagagctggaataattttttcttctttctactgttggcacatcaatatctttttttctgcaaagaaggggctaagcttgcacgaaaacaccggtgggaacccactggagaagggcatgggtggtttttggttcggttggtggctgatctgatgggtggtataggcagaatgtctggctgccccttcagattcctgtagattccgtaggcgaccaacatggggtgggggtgggggactgtctgctctttttgatgcaaatatcttcactctccttggtgcttctgtggttgtgcctatgaatttaggaccttatgcctcatagtgttgagtcagagcaaaacagtttacatcaaaggccacttatttaattttcctcagaaaactctgtgaggataatttctccttcttataaacggaatgcgaatgtgtacacaaatgtgtacattatcccaccgaagggtgatgctctttacttttataatctagattttaaaaaatttggtggcacttgatttcaggtcctcagactccagaatttatactcactgattagtaatgcattatgcaaataattcagtttacatatccaaatactgttttgcatcattcacacctcatgtcttgaaaaaaaaagtgaaatgtttcctcaaaataaacaaaacctgcagaagagtttattgtaagggtgaaaattaaagaggaacccatttgcctgggaacttttgaggaaaattttaatactcctgcataaataattttgcaattatttttgattcctacctaatcaatataccttgccacgcaaggtatattctattatctttggctttctgaatttttcaattttcagaaaaagaagccataatactatatcatacacacatttgtgcataaatacacaggcataaatgaaaatttaggccgaattatttgaagaggatacaataattgcttgccagtgacatgattctcctgccagagagaggggagaataactaggtgcaaacttttaacactccaagtctagagagaattatccaagcatagccatgaattcctgagttatggattggcaaatgacaatgcctatgaaaacgatctctttgtcttcactgagttttctttgtcattggagtaatttaggagaatacaggatgtgactgggagccctttctgaataagcacagtcccatgcccacgtgaattcctaaaccagtggctcccagctgcatgtgtcagaacagaactggcctcagaaatctacaagattccagtggttccagcctcactttctccagtggtcaacttactgctgttgcaaagcacgtcagatttcaggagcgatttctcttgtaaggaaagaaggcaggcaggcaggcaggcaggcaggcaggcaggcaggcaggcaagtgaggaccttattttttctctgcagcatgagtgcagtcacctttttcctacgatgttccacacccatctctccttacaggttatagacacatttttggcactgcataaagtaagcgttccaacatgtttttaatctttaactttcacatcattaaaaagctgatgtactgactttcagctgcctggagatagttcagggcccagcacctgacaggtgtaatgttctgtgttttatgtctctcaatatggaggttatagaatcaaaaagaccgcaaaatgccttaaaggtgttgatacccatagacagagcatgcatagtcctcaggttccctttcttgccccgctttcacacctatttctttttttgtagcgcctgtatttgaaaggggttcctggtgtacttgggagaaaagaagcttcttggtttggtagtacctaccagagactccctgtttcctgctggtatcaggattgaaaaatcccacttctgtccattttctctcaagagttgagagatgtgtgccatcgctctttaaaagaaggaactctccttttgctgtggattgtagggagcagatttggtgcttactgtggcttcaggacccaccttgaatgacagaatgtcagtaacaagcagccccaggaaatacggctggtggtgaacgactgcctcttgatctttgcccatcgagcaacaccatgtggatggtgtccatccagcttgacctgaacttgaacagtaattgatgagtccttaaaatccacgcccggcccccaggaatgccttggggcaccccatcccacgttctgattctggatggacttttaagtgaactctgatgatgagtaggctcttaaaactctttctcaacgttctctgctgggtttgtgtgtcacctcccatgccctctctggtgtgtggtgattctcagatctagagcaatgcttcctgccttgtccccccatgcctttgcgtgtgggaagctaaaattcacatgtgcgatgccctcccatgtgccatttttacctggtcccttctgctcactctttattcatatttaaatgcaggtgagttggaatgtcatcttacaggcataatcctgaatctgctctatcgcagacattttaaaactaaattaaatgttagtactaagtagtagccaaattctctgagtctgcttcatgacaggctgtaacacactggtatggaacggtaggtctaatcctgtgactcctttatctatgatgttttatgtattatgagagctcagcagatgttgacagagggaatgagacaagatgattttaggtctaggtttgatagataaaaaactgggccaaattttatattttctttgaaaagatagctaaatctcagcaattattttattttatttattaagctttttgtagagacagggttttgctatgttgcccaggctggtcttgaactcctagcttcaagcaatcttccctctgtggccttccaaatttctgagattataggcataagcaaatgcctctggccttcaagtaattaatttaaagtcttttaaaaattttctctcctcccctaaaattgggttttagagtaaggttcttgttcctctagtcgacaagagtttctgaggaatcatagaagaaagcacagctctttgagcatagatagtttccttcgtggaaagccaaagtgaatacttattgagcatcttctatgtagacatagacttgtgaagtcatatcattaaccctgtcattttacagatgagaaaggttgaggctaagaggggagtgagtgccagagtctacttgctaggcagtggtagacttggcccagagcctggggcttcccactttcattcctggctgactgtaccaatcgcacatggcctctccatggccagcaggagccagaggtggcccgcatgtgctttgcagaggaacttgcacccacgcttttatcggtgatggctggaatgcttttcttaactggagctttgttgaagagcctggtgcttttgtggcagtgctaacctggggagcccatggtaaaacccaagcaacaaaaccaccacccaatcacctgtgctgttgcagagaatggtcctttgccctttcttcttgccttgttcctttccctgttttctctgccctttttcggggctggtcttcctaccacctttcctgctagggctcccaaagtgtggcccttctggggtttacatggtgtgcccagggaatagcttggcttttttattcagataactggagataatggagtagatggagttggggtggtgaaggaacgtgtaccctctcaggggcagatggccctccagaattggccagcccaacctcttcctcaccaccctagttctatttttaaagacacctctcaatcgcaggaaatccttccttttgtctaccttcgatcccttatgcttcattttaaacccatttcctcttcattccagagacgacaaagtatctcatcaccagctttgggctgaaatgcttcatattttacattcttcattccattctccgccacttcttcttcctaaataatctctttcctgaacctgaactcatggatctattatcttgtaacccatttattgtttctatgcctctctttagaatctgctggttttccagctcttttactcaaacattagtctgataactacagagtccaatggcaagatatcttagtgttttccacattctttagtcttatgtctgcactcttatgtcctgcttgcttttttaaaaaccagtgcttcattgatgactcatgctcagcttggtgtccactaggaatgctagatctttgtcagccatctttgagggcagttaaactttcactcccagttgtcctgatgccacatttctcccatcccaggtgcccctctctgtccttgtccatattgagcttagctctccactcctgacacgagttccctgacttcctctccacttccccggatgacggtgagttacgatcttgtctcctaaggtgccccctccctcttggctcctctcccagtgacgacttcatggaggctgagaaatatagtgagtggcctttcttgcctcacttactgctcggtaagttagctcagggggagagctgttcataactttgcactgacatctggagaacaaaggttttggaagagcggagcccagattccctgtgagccagcagagccaagtcttttttgagtttccagcaaaacctgtgttttaataataggagtgggtcattgtgtttaatagtacaacaaaacctaagtgcacataataagcacatcttttctgtgtgctggggtgaggagaggtgacagtgagtgtgtaggatgatatgaaaagcattacagacatgggaaagcatcttagagcacccaaagctggcatgagtcatcacaggcttatggccacaaggctagattttcaatccctgcttccctttttcataacccagttcaatgaagacataattgaagtggtgagaagaggggccaccgcccttcagactccagggtatttgtattccaggacccctccgtgggtgttggcccagcggtgcccagagaatattcccttattggatctttctcgaattgacttgttcacttcctgttcagcgcagcctggtggtgactcggtaatccccacagtaagacctcacagtgggttgagtggcctgggagctcaagtcaggggcagaaatggggaagctggaaagttgggtgatcaagagtcatttggaagcccccatgtctgtgtcagtccactcacatctctgtccgccacccaccaccactttctccctgcctgaaagcactgggctgtgtttcagagaggtagctgggtcccacagatatttatggagggcttgtttctgtatctccttctagtgggctggacctccccaggccatttttctaggtaactaggaaggcctgactctgtcagcaacttggctttctttggaggaggtgtcactctgggattagttaaaaggggatcagtggtattcacattggctcgtgggtgtattttctcctcctcaaattataaccttttggagggcaggagtcatgttttattttttgtgccttcttggtgcctaacataatgctggttcatatgtagtatttaatctgtactttgctcacgctgcttgattgaacagagaaagaccgggctttgaatggatccccagctccctgtccagggaaggtgtgaggctgggcaagtttatttcccccttcctccctggggagaaagtgaaaaagtgaaagtgctggggttgggatagctggtggtgtctttgtggctttcaccccatggtcaagcagtgaactctgcttgcagattctgtctcgctcacctggaagccagtgttggggaaggagcacgtgggggaggatccttaggtctgggcaacactttggagttagggggtcccctggaggtgtgggaagctggtagtggcattctggaaacaagctagagcctgtctcaccagagggagaacggctgagttcggaagggactggggcctgctttcctttgggtggctttgactggctcttggatgagtttaaaaggtgattctctctctctctctgtctctcttttctttttttttttttcttttttctgttttagtgtatgtgtatgcaagacctttgatatttgagtagggaaatcctctcttatcaatggaattcacagcctcttatggtgccttaccctttcattgtgttgtaaagacagtcagaccaactagatttatttgcacaactctgatttttttcctaagaaactcccccacccaatttaatttttttttttttttgagatggagtctcgctctgtcgcccaggctggagtgcagtgctacgatctcggctcattgcagcctccgcctcccaggttcaagtgattctcctgcctcagcctcccaagtagctgggattataggtgcatgccatcacacctggctgatttttttttttttttttttttttaagtagagatggggtttcaccatgttggctaggctggtcttgaactcctgacctcaggtgacccacacgcctcggcctcccaaaatgctgagattacaggtgtgagccaccgcacctggctatttaattctattttcagatggcttgttctccaagtcttgggactgcccagaaatgggttgcctggtagggctcatggctcagcactgcgatcccaccagtggccggggtgttccttagccttctagttcagttgtggcccttctgggcttcctttgctaccagtttccaccacatggctggaggtagcccagcctggaagcctctcagagctccagcctggaagcctctcagagagtgcttggagcactgctagctgcacgtgctctcaggaaagtccacaaggagatggctggtgtggctcagagtccttgtgtgctgcctcagcccatgccaggccacctgtggctgtctgccctcaagtctgtccttctctgaggatttaggactgtgaacctagagaattcaaagtagtggaactagaatccaggtctcgactcaatccagggagttttgctcaccacaagccaggaacagcttctcttcatggaggtgcctgtctggaaggcagagaatctctggcttgttgagaagagagagtctgcccttcagactgcaaggtgttcactgcataggacccttcgtaggtgctgacccagctgtgcccagtgctagagctaggactcagttctattttcccagagagtggtgtgatgggaggctatttctttttcttttttcagtcctgatcagggatgagtccgtgctgttgggtttattcatttactttagcgtgtgagtggggagatggattaggcagcaggcccttggaagggtgggaagattcagaagagagagggcaggactgggaagatccagacaggacatgaagatttgctccacaaagagagaagcagcaggagttctggctagaggctaacccaacacccacacctgccaaaggggttcccatggggtggctggcttgaggggatctgggcgctggtttctgctgtggacagcctcaagtggggcgtggaggcagcatctccagaagcacccggcagatggctcctgagggagcagggactccttctagtgccactcctgggactaaattccttgtcccctccttgtctcatatttagcatcttggagccgtgtcagctgcagagactggagtccggggcatgatggggatgtacctgaaacctagtgagagtcatcctgactctggggaagagccgctcaaagatgagaaagataaagtaatttgccacccccaacccctcacaggctagactatccatggatttcagtggggtggtgagtcctcatgatccctgaacctctcctcaaatggtgactgttctgggggtcctttctctgcctttctcagggggtaaccagaggtggtggtgtggtccactgtgactcgtcagctgttgctctgtgtgttcatttttgagaaaatgttaatctctgagacgtctaagaggtgaaactcctttctctgtgtctcctccaaatggatgccatgtgggtgggcaaagtggttgggtttattcatttactttaggtgtgtattgtagtaaaacctgcttgttctcctatccgtcatcagaggtgactcatacttgagacactaaaagagaataaactgtcttcataaggctgtgaacgtcgccagattatgaaccaacttcaagtaacgtagggatgccttgataattatattattgaaaccatctccaattagatatgcaaaatggagttgctgggggcttcagttttctttagaccaaataatttagagctgagaggagaggcagataccatctagtctcactttttacaatttagcattggatttgttgagcatgtactctctgcagagcattgtgataggttctgggttgggaggggagccgggaaggcaagcatcctctctcaaagctgcctttctcatttgagaggcgagtgtgtgtggcacaggggcaggtagaaggagacagatcctttatacctgagagcaagatgtgcagccaggaaagctcaaggacacaggccaagggaggtgaagtgacttgcccaggccacccagttacctagcacagctcagccacaagcccaaatgaatgattctgagttccacatcagcgcatcgggcagccaccatgagcagttccacagtgacaggtggggctctaggtggcttcctttaaaacatctgaggaaagcaggcttcctctctgactgctctccaggggtggtgagcacaggggttcatctgcagctccccagctccagtgctccttagccttccaagttgtttgaattaagttgcaagcccaggtggctgcacacatattcattttggagtgactgtgacacttgtatttcctgggaagcgttactatgtctttggccgagcaagtattacgccatgagctggttccctttcttttgcctttgaacacctacattgctgggaggataccttagtgagagtgcctgggccactgggcgtagcagaggaagcacctcatcattttactgatttatttgaaagaaaaaagctccctccaacccttgccttcatagaaacagagtgttgaaagcttggagaagaattaatgactcccctgccccttagtgtcttacatgactagctgcttctttgcctactgcattttcaacttatttcaacttattttctgtggcttggaaaatacgttgactgagtgatgattgttttcatgaaatggtgcaacatgtaaagcaatggttgtcattaatagtgcagttatgtagagtgtagctctttgagtcttcagttttgaatcagattagcgctctgttaacttaaaatagccccaaaaaagaagaaggaaaaaaaaagaactgtcagaaatcagagggaaatattagcattatgaaacatggtaacaagtggccattagcactttatgtctgcatgaatagcatctttaagtgttttattggtaacggaaaagagtggagtcacatagaatgacattacttcccaaattggcgagttcttttaattcagacttctccttgttattgcctactggggagcacttattcacctgtcaaattgtatgctagggtgggaaagggtattttagcttttctggctgcatcccgggctctcaggtagaagggatttgtccctttgccatggcctccttctctcctgccctccccagtgcccctgccaggaggagggagaatctgaaagcaagaatggagggagagtaatgccgtggaggcagctgggatttgtgcctggccagtgcccctgcacagtattggatatgagtatgggcatctcagtgtgcctggaaacgcagttggctgcacagccccagtgggaagaactctgaggaactgctggtggttggctcttccccaggctctcagcccctctttctagaggctccacctaagccttaggaaagactttcgtttggttttaactggctcctgtcaagggttcccccaaaccagctcaacccctccatttacattataatgcaaaagctcttccctgtgggtctcagggcctgtggggaaaatggaatctggctcaaacccaagatccaaagctaaagtgcccccaggttgggctgcctgacagttttatagatatggcattgagtggcctcctggcagtttggaattgtgaaggttcactcattcatttttcaacaaatattttgaacacctgccacatgctgggaacggttcttggtgttgggcatagaaagccttaaaaactccctgctcttgtggcaccccctttctagctggggagagacagaagatgcaccaataaatatgtgaattatatagtatggcaagagaagatcaaactgcctgcacgaaaataaggtggggaagaggggtaaggggtgcatggtgaccaggcttttaaataggataattagggaaggcccaatgagaagcaaaggctccaaagaggtgaggaagttggccatgagaattttgagaagatggttccaggaagagtgtgtagagagcagagaccttgtgtgtaatacgcctggctactggaggaggagcaaggggccctgaggtcagagtggaaagagtgcaggaggaggaggagaggagaccagctggctccttgaaggacgtagagcagggatttttggctctgactccaagggagatggaagccactggaggagtgatgtcatatgacttgcgcttccagagagtctcttgggccgcattttgagactcaagcatgggaaagtgaggcagaagcagtcagaaggcaaattttaggcaagtgatggtggcgtggaccagggtggtggggacgtgagaaggggctggattctggacatacttcgaagggaaaaccggcaggatttgctgactggtgggatgggttgtatgaaaggaagggaggagtcaagatggaccccaaaatgtgtggctcggtgactgggagaatagaattgctgtttattgggatgggccagaaaggctgtggaggtgctcagaggatgggtgtgtctggggctccttcaccacttcaggacttcagtggatgctagactactgccctgttcaggaagatcgtgaggggaaagagagtagccccccgattgtggctgttcggagagccccagttgactgcctatagctgagatgatttaagtcgagttctttggggagggccaggtgtttttctcctcctcctaatctttttgttctttttccttctctgttgttctttagctaccaaagacaacttgatcttttgatccagaaagatgcgctttgtttcttgcatttctttcccttcgtttgttttctcaggtctcaggtagaccatcgagctgctgttaattggtgatatttaggaatgggttggaagctgcatcttttcctggacttctcaggactctcactgccacgtgtcttgtgcttccacagaaccgttttctgagacgtccgtgtggctctgctgtgctcaggtccacggttagcccctggcttggaatttcttccggaaatccgttgtcctcttttccacaggttctcctcctccctttccccatttctggaaagaagtgggctggcacatagagcctttttccttgaaaggagagtgcagagccctctaatggaaaagtaaaaaaattcttggaatcctcataacatccaagccagccaaagctgagaccaagtaaattattggggggtaatttgcaagggcctgaatcaaacaaattgctttcttgtttctcagcttgaatctttagaccagaagcctgtgatttcggagtctgatgagaaataagagtcagtgtttctgtctgagccacttttctttggaggaggtcctctaggctttagcaatcacagaagaaccagtgacaggttccttgtcataggagagctccttggtcctcaggattcaaaagacaccttaagtagcagtgggtagggcgtaagtttaacatccctcaaggtaggccttaggtttccctctgtcccctctatggtgctggctttgccacatgtagaacaaactcttctggaatcataggtaacccaagggggagctcagagaagagtccaggctgccagtgcaaaggtccagccctgtcgccaaggagaccctcagggaaatgcacaggcctccagctattcccacggcccctgtagctgagcgccagcttcttcctgggccaagctgaggctgtttcctgccgtgtccattctcctagcaacgcttctctttggccagtttgccatagtacctgaggtaagttttgtcctttgcctgccaaatgctttacatcccggaggaaagcaaagtcctcttcagaacaggaaaagtccagtgcagttccacactgtgctattccagaacctcccagttgcattcctttgccaactaggtaatgtgctagggatatttgtctcgcagcaactggcaaccccctgtttgggtaaaagtcagactcagggacccggctgcagtgcttgctcctgtggcccctgcagggagtgtggcctggggtgtaattctgcacacccaggaagcttctctgtctcctctttcacatcaggccttccctgtgtcctgaaccaagtgtggatgagtttgagcttcctcctagtttttatttgtgtaatttgttgttgttgttgttgtttgggggtgggggtagacagtgctgggcctgtcagaattttaggttggttctttgagatgaataactacttagctgttgctcaactacttttgtttgtgaaagaaagggcagtaagcaccatgacatgagagaatttcaggtttattgtgatttcttttttgtgtttgcatctgtcgtgctcagttagggcattatccgtaaccccataggaaccaacaccgaagaccatatgattttaaagctttagaaatctgcgtgtgtaatatgtcttttgtgaatttttttttgttcttttgctttagaaactgtaataataatccatagtaattatcccatagtatgctgtcctttgttacaggagcattggattactgtgaagacgtgtcctgtatacagtttcaacagcttgtttttacttcttcccttctccccgcacccgtcgccccccaccccacccgctttctgtcttgtgctgtttggaagacaatttccacatttctgccatatgtcttagaaaagctggggacttagaagcagtagccgacttaggacagcaagctcagctcaggtgcggaggcagccctgtgtaagagactctgttatgcagtgagctgttgaaacagctgcatgtggaaacagttcttccccttgcctgtcctcatttcttgagagactccaaaacatctgaaaatgtaaaagcacttcacaaggttttaacttttctggcttgaacggaagcagcttcaagtcaacaagagcacaatagtctttgtaggttttggacacagttttctagcttttcaagaaaggcaagggccctccttccctccctcccttcccttcccttcccttcccttcccttcccttcccttcccttcccttcccttcccttcccctcccctcccctcccctcccctcccctcccctcccctcccctcccctcccctcccctcccctcccctcccctccctccctcccttccttccttccttccttccttcctttcttccttgtcttgctttgcattctgcagagctagaagagcatttaatccttggccctctgtctgttgggatattatgtttttttaatagtgcttgtttatgactaaggtcaaagacagtatttcagaacaaaaattagagttagttcataattgagtacatatgtacgttactgtttatttttatagtttgctaatttatttttaaacagctcagttacgccaacatgtttatagctctgttcatcacatgccttaccagtcagggtgttaaaaggcacatgcttttcaatagtttggatcccaagttaaattagataatgccatcaggtagcaatttaattacattaattgaatgtttaggcggaaaggtagttttgcagaggctataatgaaatcacatttataagtacccatgtataaatctcagcattatagacattatttgaggttgctgacagaaaaatggatatatatcaggcgtttaggaggaaacatgcggggggctgtcatcagtggtaaatgctgccttcgccatttaggagactgctgggcacggtcgttttcttagtgagctgcctttatcattagccctctaagcagccatgcacaaaggcacgtgggtgctgtgttttgtatagccagggctttcctggactcagcatgccagctggggccggctcactgaggctggaaaaatgagatacagtctagtgaggtctttgtcaccttggagggtctgaggactggtgcgctcgggttgacccatgtggcgtcctgagccagctctgtcctggatctgaggaacactgtctgaagttttccaggggtttgacagaccagaatgggggccgctggcagggcctggtggcattagatgtggcaagtcagaccacagctggcctgtgaaggtgactcttcctctgatgcagagagaattaaatgaggaggccagagccctagctgctgcctcccctccatgccctcagagaaagtgggagtgctggcatttggctaacaggacaggctattttgggcccaggtgttctttctgacctctctgtgatttctatggtgggtgtcaaaggatggctgggaaaggggatttttaggtgtgctaacatcccttgcctatgagtgattcactatcttctcgcaccatctggtttcacccgggctgcaaagcctagtgtggtgtcccataccctgcaaagccctatttgggttatttaccaaatgccaccatgccatctccacagcatctggcagacgaaccaggtggggctgctattgcttctgggtatttacgggatgcagatttttctgcccaccgttgttttgggagggatttccccctccctcaggtagagttgttctcagagatatctgtaattggcccttcccatttaagagtcagccacgaatgatttattctaaaatgatagacccaggtagagaggttacccaccctccgtcacagagtggccagctgtgtcccctgcttccgggaggtgggaatgcatgtggaggggtcgttatttcctaactctcttgctctggcagcctgaagagctgtctgtgccctgaacaacagcttagggagctggaggaaagagaaggaggtatgcatttgagggagagaggcccactgggttggacaagaaggtaaaagagggctggtttggcccctaagggaaggacaggaaagcacccgcttgttccctgtgtggatgcagtgtttgtccagctgaaggcagcctcactcggctgactacctgatgagtgattttccccaagctgacagctgctccaacacatttcacctacaagtcctgacaaagtggtgtgttcttttggggctgttattactgcagcaggcatttggaacaatctggaagaatggggtgccaaaggacacccttgaagccgtttctgagtatccgtcccttcttttctctccgatcctctagcttttttggcttatgaaaaattgggcccatccctttcgaatgtccattgtgctgttagtaatgaggatacggataaaatcacattttttttttgagtaagccctttgaggagtattgtcaaattgagactcacctcatgagtaaccctgtgaagaggcaggagaaagggtagttgaagcttagagaggttaaatggcaggtctggtctcatgcagccgcaggggtagactagggattctgatccagaactccttatacttctgggtccaccccacgcttccacagcctgcacacagggtagggaagttgtggcttgcagaaggctgtttttttggggggacgctctgttttaatagtttggagcaaggaagctagtggtgggcgctcactggtaggggaggcatgtgataggaatcagtttgatcttttaagcattttcagggacagatatgtacctgatattccacctctctatataatttcaagacttgattggcattgtccctaagcaccagtagaaagcttgaagaagcttctcagtaaatacatcagctgtatttccaggtgagcagtacctgctgaaatgctgagagaacgttctgactaggagggcttgggggagacagagacagagttggctgtttcagcagactcattctgctatttgctttttgccttggagattattttttctgggtgtcccgatgctgagctcccacttcaagaagaacattggtataaatttacaaaccagaagtagtcagaggttgacttttttgttctgttattccttctttgggagagcaggctggccaggaggaaggttcaagtgtgtcatatcctagcattcagataggtggcctcctctgccttttcagtgggtggctgggctgggtgaaatcttgcagtgactaagaaaggaagggtggacccaggcagacccagaaggtactgcatcttcatcattgatcctgcatgcgtgccggtaggcagcagttctggaattgctggggaaaccacagtgcagcatgagccctggggcctgctctcttgtgcccggctgagcatctctgttctgtttggggagtcctgccaggcaagtgtgagtcaaagaggagaccagggccctatgtcatgggggcagtgtcggctgagtggtactcttcagagttctcagaatgtgccgctcgaagccatgtaggcttccagcaggcttctagcagatggggttttggctgggttgggccttaatactcagtgtctttcattccctctctgccccctcgttcctttcctgcatttcttgctttcttttttttctagaatcaacgaagcagccaataaccaattttcaggaggtttagatgaatgtgaattgctgtttaatataaaaattttattaaaataataaagctctgacaaaagatccagaatattgtcccttgcagtgggctttagggttgcatcttggctcctaaatcttctaggcgggttaaattagtcctcacaaaatgtcacatttccctggcagctataggtttccaggagggtgaacaagggccatctgggtgtttgctgagggcttctcagtcctgggtaggaactgctgggtgtggaaaccaccaaggctttgtaagcctgaaagagccactggtattgggagcttggtctgcactcagacctgagcgccacacattattttcccagatttgggcaatctaatggataggagggagggttatgccccatctgtgaataggtggaggagagggtccagagaaaattgttgcagtgctcagaggaagcaatagcctactgtcttccagggacatgtctggctcctggaatgcctgtccaggctgcggtgggtggcatgggtaagggtttttaataaaaagtcacaatgcctggagaagtgaggctccttgcagccacctgccttttctgtcttgggtctcctggttggaccccattctggctttccacctggtcagagcctcctgaggctgcagaatggggctaacatgatcaagggtgatgtggcttctccatcttgggactaggagtgaccaggtttagagaaggtggactcattcctgctcccattgccaggacaaatgcagagtggatctgggtctgtcccttccacacagacaccttcatttcaacacattccgtgtgtattaagatgacagacacgttggttttgctccaagccagtagccatccccctagacagcccaggccttaaaagacaaggaggtgtttggacaagagcaagaaagaagtctggctgtgtcttctgggagccccagacagaccagtgttctttctcactggttcactccttccccagctcattttacccactcgagacttgattctcttagagattaagtacctcccctggtcacatagtttctgggtgacaggactagaatttatttcttttgatcaccaattgagtgctctttctgctctactgtgctaccatgatcagaggtaaatttgtttttctctgatgatgattgaaaacagttttattaacatatcaagaacattacaacacaaagagtttctggtttaaaaaatctcttttcactggtatttcttaaattcatattttaatattagaaagcatgggattgggtgtgaacactgcttttggatgttggaggaagataagagaaggaagctggctctttctttaggagcaatacctgagatcccagaattgtatgtacaaagtgtgtgatggcagagctcaaatctgtgctagcgagaaaccccctgctactcttctgaatctgatgaagaagttattctgtctgtgcagttttattaggctgagactttttccgatggtttatttttccgtttgctcacagaatgtagaggagagccaggagggagctgacacgttcacactgtttacctactccctgactttggagctcagcaaatctgctatccatcattttgtttcaccagcttttacaaagcaggatcataaactgtaagctcatttggagggacctgatctctgattgttgctttgataagtatctatacaaatattcatatcattctgatagtcttgagttgcattgttacaacatgcaaacctctcagttttccaggacttctggtggtacagcttctctgtggagtgaggcatatttttggtctggcctttcctccctgaagctctgttagcctgagatttcacctagtgcaacacaagttgtgtagaaagaaacataatactactttattccataattcactagtaaaataattagaataaaaggctgttttggaatgtagagaggcagaggggctgatataacttctcagaatgcatcttcctgttttcccgtcttaaatttttatgtgagatgagcacactgctgtaattaagaaagcagtgtaaggctgggcgcagtggctcacgtctgtaattccagcactttgggaggccgaggtgggtagatcacctgaggtcaagagtttgagaccagcctgaccaacatggagaaacctcatctctattaaaaatataaacttagccaggcatggtcgcacatgcctgtaatcccagctactcaggaggctgagggaggagaattgcttgaacccaggaggcagaggtggtgagccgagatcacaccattgcaccccagcctgggcaacaagagcgaaactctgtctcaaaaaaaaaaaaaaaaaaaaagaaagcggtgtcagtacttgcaaaaggcctttccctcttgccactcagggaagcacccgaaagagaacttacaaaccaggtaaagtatttggaagtgattaatcatattacaagagtgttcttcatttcccccaaaggaccatggcttcctgtgacacttacctgtgctcttatagatattaaagacagagccactggactgtgagctccttgagggcagggaatgaggctcattccattttgttctggcaagtagcactacaggtttggaccaaatgaattaaattggctgccattgaatcaaagcagaatgaaggtagtgtttctgaaacaataatataaataagtgcaaaattggatgtttaccaacaactttccagaaacaggtcttgtttcagaagatgtgccaaagatgtctcatgtgggcagggctcctgtggagacctctgttgctgagtgagtcaaccatgaggtcggctgagcagttcagggttctcccattttacagaggaggatgcagcgacccagaaatgcttgcaagcccacccagctaggcttgcttcacagacactcttttaactagttccatcagcaaccccaggttggccatacaatgtcatcatacacattttaccagtgaagaaactgaggcttggagaggttaaagagctgctcccagacacacagccaggaaattggtggtagatgaaggatccagctcatctgtctaacttgggagcctgagtgttcatcttacctatccaccaaggcttgaagtgaggtgccccgactgtgagttccaggtttgatgcctacagcccatcagccttataccttgtcttataccttaactggtggagggtgctgtctctgtgtagcagccaccagcctagctctgaaccctgtcctgaggagttgggaagtgtggggtgtctggtttattccatcaatacacgtagtcccttccattcttctgccattttttctcaggggctctccttccttccctggctcttgggtaggctgcctgctctgatgtaagttcctgctgggatgattgctctggccaggcccccagctgctccctgcccttctctgaaggcacatctgtcagcccacagaggcacggttaatggtggcggggaagcagaggcagtgcataatgggggaactggccccgggaacctcacctgccctatccctacctgccccctgtcccctccccgcctgggcttgacttgtccactttcactctcaagaccaccgctctcacacacaggtcctgtgctgcccccacagctttgcaggctgctggttttccatccagggcacagccgcaggcctctgggcaccctagccctcagtgcccagggcaaagccctgacatgcaatctcactggcaggcagcctcaggcaggcctgggcagaggaccgaaaggaggagaggagggagggagctacagtagagcagacaggagacaaacaccagctaagagtaaacagcctggcagtggggtgagtgcctggctggaggggctcacctgggctggcctgcctgggaggagccaggtcggtggctgctctctccgaatcttagtcctgcttgaggtctagcagcttccggagctgcacatggggcttgaggtctggtgcttatggattaggaggaagagaagacagatggcagagtaccaggcagcttaggaacatgtctccttccacatgctgtggcccaggtgctgcccagagctgtttcacagcagcctctccactcaaggttgagcggtttccttcagtgctgtccacccctttggtccggggagcttcatgttcctgggcctcactgacacctgcatggggttggtggggaggtatgaggggttggaggggtctttttgctagccctggcccgtggcaaacactgtcttgagaaagtgggacgttgaaggagcttggactctaaagtcagctacacatgagtcttttcacctgctggctaggtggccccggacaagtcaatcagcctattgggcctcaggctctttatctataaaatggggctaatttccttttttgcccctgggaagaaatatcacttagaggagttacagaatgtgcaacctttcccaggagtattgctcctgaaggaataaggcacgatgggctttgacttcagcctccagcactgtggcccagaagggtatggctgggcaggggcgtcacacccctgcagctctgtgggagtgacggaagggcgctatccactcgccttgcacatggctgtcttgctctaccaggccttaggttctgtggccagatactgttctccagctctttggcttgggccccgagaccagagaagataatggcagcccagaaacctgaatactggggaacacattgtagggtgatctcccagaaaagccagcgagaaatggactgtagctgtagcattcttccctttggatgcctgtgtggggacagaatcagtggaatggaaaatgaagaagaaacactggccctgcctctcatcaatgcccccccaccacccaccaccaccacctgcttcctgttctattagacaaacgtagtttctggatgagttggacagtcatctgagtttgatcaagatttacaggtaattcaaatgtatgtataaggtacatacatattagtacatccatcagagaggcttccttaagccacaagtctctagctcctcagagaactggcagtctggctgggtctgtacgaacttggacctatagatgacctcactggtttctccccttgtcacctcatctgcctgcttccttctctttactgatcttatgtgagtaggtagaggggtcagatcacctctgctcagctctgcccagcacactaagcctatttgctattaaaatttgaaaaacaaatgcaggtgccagaggtggctaaataatgaatgtcccaggccaattctaggaagggaagtgggtatggggcagcccattgccttcctggtaccaggatgatgcaatgcttggaggctgtgagctccccaccttctcagggcacaccctgtgatcttgtgggacccctctgtccagcccagcctgggtgtgcatcttgtgtgcttggtcggcactgataggggtcgcggtagggagttgtcggcacacactgctgcatgtcctgtgagcggtccccaaggctgtgcccagccttcagtgtccagggcctcttctgacaggccctgctggttatcactgttggcattatctccacgcaccacttctgtgcccagggctgctgggtcaccttaaggagccacacacccgtctacatagaggcccttcctgcttggggtctgacccagttatcccctccacacctccattctcccagacttttgactcaccccagccctgctaagagtgatgtcctcccccaaagagaagacccctgctcttgagggtctgccaggtgggtccctcatctccccacctccatgggcctcttggattttgtgcatagcaatctctgcaacaccctgacctttatggggtcatcctcggccaatgaagcggtgggtccaggctcccccttctatcacctggctcacttccatcctgcagaggaagcttggtttcatttaggacaatgtgcaggatccttttgatcatttctctactggatcatcagcaaagggagaaatgagacaaaagaggccactgagtcctttgggggaaatatgtgcctatagtaaggtgatagttcagagaaagagaagagtaggaggctggacctgaaggccttccaaaaaaagtaaaggatgttaaattgctctggaaggtgcaaagtgccatccagtggaagctattattattattatcatcatcataatggtcattatcatcaccattataggatatggcactgacgtaggtagtgactggtaagagccgattgagtttctagctgattcctgatgttaggggccatgaatctgtctacctggaatgttctaattcaattcaggagcggcagtttaagtctagacttcaaagcactctcatatatccttggcctgctaacctgagggctagtttctagggattgattaacttaaagacagttcatatatgcttgaatactagctattcatattctgaaaaatctgacttgatcaaacagagcagttaaaggcgatgcttcgttttacaaaagattttcccccctctttacaaaaggatgcacagtggtattcctttcaatggaatgtttctctagctcattaagtgtttacaggtcattagctactgcatggaaggactttgctagagaaaaggaaggctgcaaggaaatagctctagctctagctctagcttaggggatgctagctaaagggaattagaattggttggccaacaggtgtctgcggtgtactccctgtccactcaacactgggggaggagtagagatcttgcttccttccatgtgagagcttatagtccctttggaatccagatttatcgtgaagtaatcgtgaagacagaaattaagtgctacattgtgttcactcatctcttatgactgtccatggggaaatgggtcctgctttacaaaaattcagtttgcatgctgcttttcaggcctatgactgtgacatccagtgagggagatttgaggaaggggttgatgtaagactcctcttgggagcatagtgagagagagagagagagagagcactcacagtggaacctagagtgggaaaggctacctggtggctgtcctggcatgtaagtaagtctgtgtggtcagggcttgcattccataaatggcccaggcccctgctggctgctgggagagaaagtcggtgaggagagagggttgtacaaggcaggagagatgtactcaccaggctcttccagaaggggtaactgtctcaaatccttgccttgaacctgcagcaaagtggaagataggtgttatcctcctctcttccctctttcctgcttcaggctactctgaactcacttttgctgtgtgtccagagctgaccagaggacaatggcagacttattgtcagactggcagcaccagcctagtgctctgtctctgcctgggaaatggtttcacaaagctccagttctgccctggacacttgcctcatagggctatccctttgcccctcagtaacaccactgggatggtccactcccaccctgtcccccatctgtggtagcctgtgttgcctcgtgggacaaggcattctgtaaacgtgtattggacttccattgcttaagtcatgatttgtttttccgacttccagaactttcccggttctggttttctgggatttcatgaacaattccctgtttccgtaatccatttcctgcacaggtgcattgctttcaatcatctcccctccggttatcctaaagccttcattatcaattgacttttcacatatgagggtgacctctggatcccttctctttggtttgtttgttctcttttccagagctgcagtatgtttcttaggtgttttaaaaaatagctaagaatagtgaaaacacccttgtaatttagagactctcagaaaaatgacagcaccatttagagcctggaattacagtttgacttcactgtgccttctctgccccaggctcccatggtggcaagggtttttggttgggggaaggggtattgaattgcctgtctttgagcaggaaaagaattacagttttccaggtaccttttgtgtgtatgtgctgattgagggcccattgagaatattttgacttttagggaagctccaaactctcaaaccacagggatcacaacacatacgtgtgtctgttatgacgttatatgtaagcatcacaacaggcagagaatgtctgcaccccaccctggaaaacagcctgactgtgccccatgggcaaaccagactagtttatagggggttctactctgaggtactgatggaccttgggtgctattcctgtgataaggaaggcagctagacaggacttgggagttatctgtagtgagatggctgaaaagcgatacagggctggctctatgccccaggtgtgcataagtaagagcagatagctgattccagtgcaaagtccatacaggtaataacataggccagaaaagagatatggcatctactcttagacataacacaccagggtcaatacaactttgaagctagtctagtgcaagctaacagttgcttttatcacaggctccaggaagggtttggcctctgattagggtgggggcgtgggtggggtagaagaggactggcagacctctccatcggtggccgtttgcccaggggggcctctttcggaaggctctcttggtgatggagaattggattttatttctcaatgggaatgaaataatttgtatgccatgccgtgtggactcccaaaattgtaaaggaggtgaagcttcccctgtctgcactctcccctcctcataattgtccatttttcatctgtcgggctgtccacccatccatcacatataggcacctatcaggtaccagctactgtgttaggatctgtgttcccaactgacttgcctccccctgacgtcatattcttttcctttttcctctcccttttcccttttcttctgacccaaactaggaattggggaaagggcctgataactttgtttctgctgaggtgtaactaataaataccaggaggcagcattttagttcacaagctcggagcacttactctgctctaggaactttacaaatacgcactcattttattttcatacaaaccctatgaagcatatactattattattcctattttacggatgagtccatattttaaattccagctgaagaaagaacatttggtgataaatcattaggaatgagctaggagttatttgtcatcacagaaccagtctgtattgccccaagtctggctttgccaattggagattagggagatggaatgaacacttttcgtcccctttgatatctcatctcactgagctctgggccgtttccactcttctctccccatactcccatcttggcaaaaattgcataagatttataagacattagggtattggagataatttattacaacctccttgtttacagaggggcaacccaggtccagagtggggaggtgaccaggccatggtcactgcccagtttagaggccatgcacagatgagaagccaaactcccagctcccagcccacgtcttcccactctcccatgtggcctgtcagcatcaccctctctcactcttgcttagcctgtgtagctcaaggatgtatttattgccctaggcgtaagaatgtgctcaggtttcttaagtaatgtaggtgtgcctcacccatggggcttcactttctctctgtttattgccagtagtggtctctgttctgttttcttcagtttctcccccttgcattgttgtctaagatggctgtcctgtcttttgtccacttcccctccactccccgtaccttcctttaatcagcttccgccactgcctgaggccactcagctctggtcccactggaggccctgtctcccccaggggtccttctgcttcctgttcacctctgatcccccagccctgccatggccaagctgatgaggatgggggagggggaggcagggggaatcttaatttcctgcactgaagctttgctgtccacagcactgggcagcagctgcctccctggagtgttgtgtgagaccttgatgctgtctttcttcccaaggcctttggcaaggtagaagtcatctccttgactctccatgctgctaatgggggaggtcaactaagtccatttctgagctagtgggggctcttaggactccgaacaccacacttaagttatctctgacccagagtccaatttatttggcctgattcaaatgaatgcccattttaagaatgttttggggtctcttcccatcatttccttagtgtagtggagaggtttctattcggaataggatgacatttggtagctgagccaaacagatagctgggatatagggtttggagttgaactctccagggaatggggtgggaggggggcagcctggaggatgacaaaatgagggctccctggactcaaactcaaaaccttttctgtgttctcgaaatgccttagatgtttacctaagagaaatgtagacatacattcctataaacacatctacacagtgtccattgtagcactgttcatagtggtcaaaaagtggtcacaacccacatggcaaccaataggttgaatggataaacgccctatggtggaatacaactcaacagtagaagaatgaaagagtaacacactccacaccatggatgaatcccagaatcattctgctctgtggaagaaattaaacacaaaagacgatatcctgtatgagtccatttgtaacaaattctagaattctcaacactgtggtggtaggtgggggttcagtggttagaaggaaggggtcagagggttagggaaggggattgacagcaaaggggcatgagggggctttctagactggtggacgtgttctgtatcttgattttggtggaggccacacagctgtatacaactggcaaattgaatccaactgtacacttaaaatgaatgacttttgttgtatgtaaagtataccttaataaagctaaagcgaaacaaaacaaaacacccaccactggagtggaaccaagtctgtctgtaacctttaactgtttgggtctcctcaagactctagccgtctttcagggtagcaccaaagtacatttcagggaaatgagaatgccctttgtattctgagattttatagaagttggtaatgacagagagagagagagagagagagagagagggaggcccactgagatggggttatccaccataagcagagcatttgggtctgagaagcgcatgagtactggtgagtatgtgaggaaggagagagcaaggggaggaaatctgttttcctagaattccagcaggcttcaaaaagtaaaaaggggagggagtacccaactaagtttttttcttccctagaaatacatttattctaaacattagcccaattagttgtcttttgtttgtttgtttgtttgtttttgagacagggtctcgctgtgttgcctaggctagagtgtagtggcatgttcatagctcactgcagccttgatctcctaggctcaagccatcctgtcacctcagcctcctgagtagctgggacgacaggtgcatgccaccatgcctggctaattttgtagagatggagtttctccctgttgcccaggctggtcttgaactcctgggctccagtgatcctcctgccttgacctcccaaagtgctgggattacaggcgagagccactgtgcctgtcaccaactcagtcttattcatcagtatgtcttctccttaagcggagatgctaacaatgtagcatctcctgtgctgaattcctgtaaagtgagggtttttgtttttcctacatccatcttcctctccagattccctctcaatttccaaggtatttagcgtaaatgcaatatctgaacttcatttatttggcagatttgtgtggactgccttttctgaacctatttgggtgctaaggactgtatggatttgggttcttaacatggaaaacgtctgtgcctgcgtagtgttgggtcctacctggccacttggctctcaacacggagtgatgatgcctagggtgttttgacgtgggcagtcagcccagcctggagaactgaggggagcatttctttcttttttttttttttcttttttctttttttggtgagacggagatttactcttgttgcccgggctggaatgcaatggcgcgatctcggctcactgcatcttctgcctcccaggttcaagcgatctcctgcctcagcctcccgagtagctgagattacaggcatgtattaccatgcccggctaattttgtatttttagtagagacggggtttcactgtgttgtccaaactgatcttgaactcctgacctcaggtgatcctcctgccccggcctcccaaagtgctgggattacaggtgtgagccacagcgcctggccgggagcatttcaaatgatagttaggacttccttttactgtacttaatagctgaagggggccaaaagtgtccatgtttgctgccctctggcatcaaaatgaggtcctttttagtagtgctgcatttaaaacagcattaagaatacgtttttagaacttagctttttgcattgaggatgcgcaggtggctgagactaacttctttgcagatgaccatggttgaaagtcagctatagagttgcacaaccacgtagttgggcttcacatatagaagatgttgtcattttttggtaactctgtcagactttaccaacctggcgcacagtctggttggcacataaacttcacatttgctcttctccagggtgtggggtggctgtttaaagagggtggatattcatgctaatctttgtgtagcataacatgttactgcaacttgcttttttttttttatctgaaagttcaagtagatatcagaagggaaatgtttgtgggtgctaagaaggttaaaattaccattttgaacagaaatgatatttggaaaaataacttcccttttaggaaggtaaatcagtcatttatatgctatttgttgaattcctagaatatatgaatatcatgtcacatgctgtgctggtactttcaaatataatagaagcaagtaggagaaagagtccctgtattgaagaaactcattgggaacacatgaaattaattagaggcatagagggttaaccagcaatgtaaggcctagatatgagtcagggagtggtgcatgggatgagtgttctatgaggttggagaaggatgagattgattcttcttgctaaggtgactaggtagaccttcattgaggccttgaagtatgagcaggattccaggaggtaagagaagaagaagaaaagccaggaaggaaatgagaacggaagggatttttacttgggcagaatattttccttgatgggtacggggaactaagactggaatagaaaattggagttggattgtggagctctggaatgatggcttaaggagttggaccatatcctatagatcacagagggctgctgaaatactctgatcagaagacaaaggcagcatgctaggggatgttaagtgaggactctgcaaagggggtggatgagttgttgaaattctctgttatacccttcatgccgagttctcccctgttgacttatatgttctagaggatggagttggttgaccgtagggtttcctttcactagcagaatggaaccagatattgtaggagcctagcacatgggtctgttactaatatagaggactgtttaaatcttggaaagctttccttttgcctttgcccccattgcagatggggagtgggcaggaatgacgttcagaatcaagggcccatcagggtctgtattggtcccttgtccctctcctccagtccatccatgttgggatactcagggcatggatggtgtttcatgatagcatttatcattttgatgatatgtgacaaaataaggcaggcatcaaaattcatatccctgtgatctctctttaatagtgtcctcctgctttgggggttattaagctagcctgaacttgagtaaacatttttggatggggtgagaggggggctgataaaagtggttagtaaatagacagttggaaaggagaacggcccgggggctcaggagatgagccagggaacaaggaaagcagagatgctagtgacccagagtgtcctagaggggaaagaacctctgttagaatttcaaatgtcagactttcttttcagcttccttcaggtgcttcctcttctactcagaattttcttttgagataggtgctggtcaaacaagcttttgtttgtggctggtcacttggcacacagtgtggctgtttgtcatcctggatgatgaggcagctattttaatggcacgcagggccgccgtgtgtttactgccaagaaataagggcttctaggagacttggtggctttaggaacaaacttccagcggcagaaattagttaggaagcagagtagcactgggttccaaatgcctctattgtatgaatttggatatgttgtgggcaaaatgacataaaagaaatggaatgagaaatagtgtaagtgactgacaaggaccccattggcatgtgggctagtgttgactggctctcacagtgtgaatttagttaggtgtttccactttattttccccaaactctaaagcaacagtttaattggggtctaaggtaccctttagaaacattttgaccacctattatttaggacacacagcattttttttctttgaagataaatttgttttgggtatggctgggtgtggtagcttatgcctataatcccagcactttgggaggctgaggtgggtggatcacctaaggtcgggagtttgagaccagcctgaccaacatggagaaaccccgtctctaccaaaaatacagaaattagccgcgtgtggtggcgcatgcctataatcccagctacttgggaggctgaggcaggagaatcgcttgaacccgggaggcggagattgcggtgagccgagattgcgccattgcactccagcccgggcaacaagagcgaaactccacctcagaaacaaaaaacaaacaaacaaacaaacaaacaaacaaaatcgttttgggtagcagtggctttaggctgtttttggatctttggctattgatactgatttgaaattttttgttattattttcatgttaagcaaaactagaaagttttaccgaattcccctgcagtacagtaagtattttctttcattgggggaagcaaactatttacagccataacagggtttccagtgaattgtataagtagcactgagttctgtgtcagcaaaaaatgaaacaaaaactgatcatagatgacattacctaaatgacagtacctacgtgtgtcctttctttcacatttgctgtaatcctgttatggcattgtcctattatctcaagtactgtcatctttaaatgctgtcaaattgtaactggattgccaaggacagaggagaggaaccagggaggacacaatggcaattcccactgcaccaaagagacggtcttcttccccctctcacagtctgaattcttggagacattgttcagttaaaatcatgactcaggtatcttttacaggctttgatgaaatagtcagattcactcctcatgttcctagaaggaaaggaagaaacactctttgaacagcccgtgagacaaactcttccaggataatttaaatgtttctacataatgagaataaattgtaagtgttactgtgtttttaaaacccaggtcaaaagtaatagcacagagagggatctataagcatttaatatctaattgttcatatattgcttccccaggtttagatgagggctccattctagagttgggaaaaccaagtcagtaaacctttagtggcagatgttatcagggagctggagttggagtacttgcattttgtgtttgtgccagctgtccatgttcctcttcatatatttagaccaaattcttatccagatttcccattaaaggttcataaatttccagttttcacctttctgcagcttccttagatagaatggttgatgagaaaattaccgcattaaaattaagcctcttgctttttacattctgctgctcataaataagggagtgggaaatggttactttgaacaccctcgttaaaggctggtgtggttgccagagaatagggctaacttaagggggatccgctaagccttctttttcatgcctttttttgttttgttttgttctggattttataaaggcatcatttagttttcccttaatctgaatctgtattcatttttaaatatctaatgttgattagtatgttctattatttatagccctccagaaggatcccaagggaagataatctacatttgagaagacgatttcccaatttccatacagatgacgaaaacgtaactgcccactacactgctccccctgctgaattttctttttccactctcggtgtgtggcattgtggggtgcagacacctgaaagcctgactggagatgtaacatgggctctgctgacattagcatgaagagcttagctaatcgacttgcaaaatataggttagggagttttataggatatcaaattatcttactctttcattgattaaaggcaaaatattacattaactagatcattacatgggtaaaaggttagaacttcacacacttaggggtgttgcactatccttccccttcctgccttgtggcaaatcacaggttggaggcagggaaactcactgtgtctagcgctcctaaatgcctgaatagcaacgttagacttaaaggaggggcatttgccttcgctttgaatctcccgagtcttttttattctgatagaatagtaatcttaaaattaaatattaatttgttctgattccatttctgttagcagggaaaagggcaaatacatgaaagggcgtgggctgagccatggccaggtttgagagacagagtgattcgcagtagtcttcccagggtgttgagtgggaacgtctccctgggaagggatgtggtcattctcagactgtgggctcagactctgtcacactgtaatacctctgtcaaccatctaatgctatcaaggccttcctgagagaagtttcaggcccaatcctgatgttgagttggcatgttcacatgtctggtaataatctgccagctaatccatcatgctgctcatttctgtgcattattcatctcaaagccagaggatctcatgtccatcacagggctgtggtctgtggatagggaaaatttcaaggcttttctgggcctgatgtagccattttctttcagtatcttagattggtaggtctttagaaattatctctcaaaatgtgtgtgtgtgtgcctaagtatagttttcttgaatttctcacttcagtacttaactacacatatgtgcagaaagtgaactcttagaatttggctatccgttctttctcattgtgtgagaaggaggcaaagttgccaaattggaggtggggcaaggtgggccagtagagctgtgattggtgtctcactttgatgtgtaggagagagaacaaatcacaagtcattctctggaaaggagccatggtccacccacagaacaaggaccctgaaatccccagtaccagtctccctaggatgtcttgcctttcagcagctgttcagtcaaatccatttcagaatggagaacagcttgtcacagttctctactcttgacctgctgatagaacaaggggcttggagattttgggtagatatggaaatagatccctaaacatactaaaaagattttttttgtacgtgtggtgggggagaggagaaccagagcagaaggttggagaaagaaagttggggaaggaaactaaaatgtgcaatctcattcctcagccttcttgttgaaaatgagaatcagatgcagcaatgtattatttccaagagctatctggtgatgggatccatctggtgaagggctacttctgggggacctggaattgctgtgtgacctttgggaaacacttgccttctctgggttgagctcagcccgtagttcacaaggggcattgctggtatttatagactgtgtttgacagtcccgagtgaaaggcaacttcacttctcaccccagaatagcaagcgttgtttctcatatctaggttgctgggacagcttcccaggaacctaatattcagcagcttcgtgacgttggatggagggtttttctttttaaatgagttgattggcttttgccactttacacattgttttccaggtctaggtttatttttcccttataggtagaatataaaagagtatggggtctgccctggctcacaccgttctgtttttgcagttagcttaaaggcatggaggacattcctgggactagcatctgctagccaagaacgaagatgacagcaacatggccgtagaggcatgggccctgctggggctaataacccactgcaggctatccttggcattcttgctggagtggccttgctccaccctacctggtcactgtgccgttcagtctgggctatggcctctcaccccacctcatcccattgcatttcataagccagtaactccaaggccagacttccattacactctggatgactgcatttatttgcagtgacttcaaggaagaaggggcctgtttaggaaattaggcactggcctggtgaaaaggtcaacttgcgaaattgtggctgcaagggatgcctttttcttccaaggctatgccttggtggtggtggtgagggtgtacaaattgttttttgtatttcctattttgatttaaatactgttttttgtttggttggttggttttttttttttttttttaagtcctaaacaagtgccacagaggatttctttttggcttgaacttgataaaatttggagcacacaagtttacacacatggtcatgaacacacaccccttctcccatctccccagacccccagcacatatgttccataatgaggtgttcctaagtgagaattcccataatttgaggttttatactggaatggtgataagggcaggaaacctcagcccatgtgcattttttctcgagtggttaacctttcctctctttctccttctttttttgcccccctccaaattcccccttctcttaagaaaaaacacgtgagccatgttggaagtacagccttgacctcagcctcaccaggtgcggctgctgaccggtgcaaaaaaataggaaatattatttaaaaggcagggaggggagagtttctgttccacaatcactgctgtttcagtgaaaagcaacccggtttatctgtaaaacctacttccctttctggtgaatgtggctgtttttgacagcagaggaccccagttgttgaggactaaagagagagaagatgagaaagaagatgctggaaacagaggttggagaaagagaggcaaggaagtagaaaggaggaaaaggggaagagaggaggcagggggagagagggttggaattcgagctattttcagctgaatgtgagtgcagatttcatcaggcttctgggctacagggaaactgactgtgtgcggaccttgcgtgtaacttcctgtgaagcagccgtggtgactgcattttctgacactgtcagagtctggacaaccctgccagctcctagaagggcaacccaacaactgtcacagacgaagcatcaaaagcatgagctgtcgatagtgacctgcatttgcagaaaatctgagggctttctaattaacagaggagctctaaattagagtaaagctgttcgacaagacccctcatacgcggtaagtgtcacaatgcagataatcattacatctaacaagcttctgatttttaacagaagctatgagaccaactcatttataatggttcagtttcaaagggggaaaaaaaagcaaccaagaaagaaaaagaaggaaagaaaaaaagggagaaaaggaagaaagaaagaacaaccagaagaacaaaaataggaaagaaaaataaaaagaaatcctccttctagtgctttgggcgagtgcttagacccagtccccaaattcttcctttgttgtctgctgaagcatccagatacatcttctgttttagattttccttactgtaatccacgtctgctaatatgccagctcattcatttgatgtttcctggggacgagcatcctctcttgagttatttctgacaactgcagcattccacagggtctgagttgttgaacacagtgccctaacttaaatattacaatcaaaacacatgacatagacagcagttgatttgggttctgccttggacagagaaacagactggggctaaagggactgcagctatacctggggacttgcctgagatcatctgggacttgcctggtctcaagtcttctgaccttggccagggatctttgcactgggcaggggaatttgagtcccaatttgaggcatcgatttaaaccacttttcaaaggcctgaatggagctgattatttgtgtgtcttcttttcctggtcttccccttgtcaagaccatttctctaccacgggatatatattagaggggaaaacggctgtaaaccctgattgttggctagcattgttcaggaagtgtagcattaaggagcaacacttctctcgcctgtgttgattctcctccaactacccacactatccttgcagttattcatgggaaataatataaatcacactgcctgattcttctcaaacatctcgcaaagtaatcatgggctgaagtgcaggttttcttgcagtgcctttatcagtaaatcagattttgagcatttatcagcaaaagttagacttaaacatcatcatttctgtaatgtttgaaagaaagatttgtttcagtggggactctgccaatcaatgatcttccagcttgactctgctatcaattattgctgcaattatttgtctagttggatatttaaaatgtcatcagaaagagatgattacacattctagaaagcaaggcactgtataatcacatgaactgaatccagttaaatgtagtgtggtactaacctgtccttcaaaatagaatttttgagctaccactgaagcagcagtcttctgccctgttttcaggaagctgatcttaaccttgggatgcagtgtgctttcagggttgggtgatacttaattatggagaactttccaagtctgaaaatggaattgctccttcacatacgcgagaagtgcattttggttatctcattcatctgcaaatctataaataagcagtccctctattcttcttgcttcctgtggatttaaatgccaaatcctgatttgtggcaaagttgtcacatgcccctttcccactctgtatgcctggtgcccaggaactaagcagtggcagtggaaattacaactgtttggaagccaagaaaaaagctccatttctcacttttctccagttccggatattctcggctctgctccatgtatcagcctcctccccacacacctcctccactgcacaccctccttctgtccgctccgtgaacaggaaacagaaatacagctccaatttttttttttaatggaggaagagaaaccacaacccgaacaaaaaactcaaaaactaaactccaaccaaactaaactctcaagatagaatcatgagagatgcaaaatgtccaaaatgtcctaagtggctcaaaccacccgccccttaacaggtctgcctctcttcctgggagtcagaagtgaccttgatgaactggatgttaggtccaaaaatgacaaacaagccctccactgggaaacatcagtccaacccctttcttttgacagcaggactagaacagaccagaggttccggagaaggtctctatacctaggtgggtttcctgagctggagaattttccatggggctgtctgtgtgttgaggcttttccccattcactttcccaattcacttcccagagagcatgctgagctcattccaggacactgtgatggtcaaaaggctctcccaccatcacacagaatgtactagggttctgttagaaaattaatctcacttgtggaaaaaaaatgcccttaaaacactggagccctgagttgtatgtgctggagcatgtggggaaaagaaagatgtagggggtggagcgtcaagaaaaacaagacaaaaaaattcacgagccatggaaatggagaagaaacactgtttctgctgcagttgctcttagccaggggccagcgtggacagcactgtcaccttgatccctgtcctccttcacctgccagcttgtgggctgggtggcttaagttctagccctgggtgaccctctgactcctgagagcatgtgtatgtgcttgtggtgggtggggtgtagtgcgttaaagccgcaaagcagaggtgcgaagggcctggtgtaggtcgtgggagacagagagaaggccctgggttctgaatgtttttacttttcctaggatccctgcttcatttttgttttcaaggagttacttgtttctctcttcttgccttccagcatgtcccaagcagagatgggtggctaggtttgggaatggggtgctgggaggggaggggatatcccattccagggcccttcccagttttggggctgggaagcctcaatctccttgagcacagcagggctttgccttctttcttccctgagctgcggccaccactgggctgtaccaggatctagtgcaacttgggtgacaaggtgtgggtggctgcaggtgttctccctgcatctgaggcagggaggcagctgggggcttccagccagcctgtaatgcccctcccaggtctagcttcctagccttatttttaagcccttttagtggagcaaaaactatttagaactatgagttcaaaaataggattattcaagcggaggtacttcacactgttctttctcttgggacagagatgggggtgcaggtaggggatgagaatagaggaaaatgtggaggattgctaaaacaaattgagagaggaaggaagaaagggacccagactagtaattgagaccaattcaccagaagacttaaggaaatttgacatccgctgtagctcttttaactgtgtaattacacagcatttggaaagtgaatgattaacctgattgtccataacaaccattgagtaaatacactattacagattgccaaaatagtacagtgaagcgatggaccagcagccactttcaaggggctgtaatcctctcctgggtcaaggctgacccagaggctccttggttagtgaatcatttactagggaaggtttcccctggtcactgctggctccatggcctggtccttccagccaggtcatttagaatggctctccaacaggaagaaaagttcactgcacagcgcttgaatcctaattatttattgaggggctcttctttgcccagcatggtgctggacagtcagaggtagaccactgagtcttggttcttagaagccttgaacttttagttggagaaccagtggtagatacatgctgattacagggagacttggatccaggagaaatggagtggagagccaggttcagaagagagacatatcctttacaggcctttgtgttacctagccagtgccttcatgtccccagccccctggcctccagctcctccacccccaccttcccccctcctcgctgtccttggtgcagagtggggcagtcatctcagtggggcctcctcccggggaagtccacagcttgctccacaccggaggagccgccaaagtcagccaagagccgcaggccataaatgcaaagtatgatttaacaaaagcagcttttgagtgagaaagctgagtggagttgtcccaacctgtcaacttcagatttctttcctcctccccataaatcaaaaaacggttggtggaagggagggacagaagcgtttcattttcagattttgtaagaaaataaaataaaatcaaaagaacctgtcccacgctgataccttacatgccaggtttgagcctgaggcaaatttttgtggccatgtaataagcctctttaaaatggtgacagacccttgactctttgccttgaattacattgataaaagacattttattgcattagagctggggcaggagtacaggacggttcttgcctggtcggcctctttgaaaccgcgtcagcctgccgtccacactctccaccgcctgacagggtttgagtgcgatggcagctgagatctgtgggccggtgacagagggggctttctacccagcagtagaaggttgaggccctggaagcaaaaggatttcagcctgaggggcttgttaagggagagttattctttcctgttcctagtagacctgagagagcttgacgttggtggcctctggtcagcctcatggttgggactgcgtggaaatgctagacctgagagacctcatttcccaagcagtcttagagagactcaaaacaaaaaatggtctccgggtcccaccgtggtgtgtggccgctgtgcccgcagaggccaggtgtccataggctgagtccccacgtggacctgctaggtgggtagaaaggagttgaagatgttgtgctgttggttggaggagcttggaggtgtctgggaacattggatgttactcatatggaatcagcagaattagtagagccaagaacagacggcagtgccacaccccatggctggactgaggctgctccaatgatggcaggttgtatctgcgggcatctccaatttgctcagggaactctttccagattggtcagtggtataaatgaaggattaggaaattgggtaaaaagccagggaggagggaaaaaaaaaaaacaaaaaacaaagcacgtcaaagccaaggcctgtgttttgttctgtgggactttgccagagagatgaggactgaggctgggctgctgtgtgcctgggaggcgggaaggtgctgaggcactgcagagaagcagctgcagcatgccccgggcagaggcctgttttctgaaagaaggacttgccgtcatgggaggaggcctggcctcgcagcaccagagcgctccttcattcagcctcacctcaggcgagagggcagcctagttttattcctgaagaaatgttagagcctgacctgctagaccattttttttggtagagctttgaagccttaaattagttctcataatttctgagcagctctgtgttaaccataggacataataggttttaattctggagaatggccagttctggttctcagaatctcttggccaagactgtcacagagtattaggcctgtgaagtgccttccacgcttcccctgaagtccacacaccagtcactcaatagtgccagaaaggcaagtgaggagattgcctgaaaggggctgtatgaccagtgtccagacgacaggtttctgccgcggccctgaggtggcagtgggaggggtttgtcagaaggtgggcagggtcctgaagcccagccctgtcctccctgtccacagcaggacacttctgagatcttcgagttcctcactgggaggtgaggctaataccttccctcattccacagggcgactgttggggcaggatgtgaggagagtactttgggaagaacataacactttccacccagcctgggcaacatggtgagatcccatctctacaaaaaatacaaaaattagccaggtgtggtggtggcgcatgcctgtagtcctagctacttgagagctgaggcaggaggactgcttgaactcgggaggcggaggttgcagtgagccaagattgcaccactgcactccagcctgggcaacagagtgagaccatgtctcaattaaaaaaaaaaaaaaaaaagctttccataaaggccaggacagatgtgcttccttaagaagggctagagttggaggccttgccctcctctgggcttgttggccttgggggaggcctgacagagccttcctggggctgcctgttcttctggccccttctccgtgcacagaccagtcttggatgataagtcaggaaagccctccacctggccgggctgcagtgtcgctggggctgcccacacttgctgaccatggctccccactcccttgtctctcacagcaccactgcccctgtttccacagtgcccacgaacaaaacatcaggagtctcttggaaacaccatgtttgattatttctttctttctttctttctttatttattttactctaagttctgggatacatgtgcagaatgtgcaggtttgttacataagtatacatgtaccatggtggtttgctgcacctatcaacccatcatctacattaggcatttctcctaatgctatccctccccttgcccctccacccatgtttggttttctttagcttattctagtattttctcaagaccgatcgaaatgataatatagaggcataaagcacatttgttgtgagttgatgcagataaaaaggcttggggtggtcttcagagtaatttgggagttgtgtgttctgctggctttgatagacaagcccttctctgctctggcaggtgttatcagaatcaaacgtttgcaaatgatcattctcatcgcatccatcttcacagccccatgcctcttcctgaatgctcagttgaaaatgcgtatttcaccttcctcaggtatctaatacttaacctgggagaaacgcaagtgtggtttgcaaggctttccaggtgtccaaatgatgatttcccatccttttcttcatttctcgagtggggcagggaggcatcggggtgtttgtgatacgtttgtgtgaagctggacaattcgggtgacagaaatatgttcagggcagtgtcttttatcgtcccttctaactacaaaggcatggattgcagttgagccccactttcagaaggcccaatacacacaaaaatctcattaatggaaactgataaattagagagtgatttttcacattacagaaagattgttaacttttcaaaaggtttcaccacagggtttctttaaatagtgagctcccccactgaatttaaagtgtttgtttacagatcattaactacttgacagagaggatattgggggttgggggaaggaagacacacttaaaaggtaaaatgttagaagccctgccaattttcaatgagcctggaagggtgacgaaacatctctgaaattatgttggttagcaaatatgatttattttacagaaattcattttacacatggctttccaagaaccctccatgctgatggggtgtggtgggaggtcaaggaccacagggtgctgggctttgctgtcctggtttgtggtggctggggagaggactcccttttcttagagtcctgtgtgtgcctttgtgagcaatgggtgccaggctctggcatgaggccgagctttgctactggacttctggcatgagccactgagaccttttcccttgacatttagcctgggtttggggaagtttcttcctggttctctgaccttcagtctcattggctcaggacacacctaggtttcctccttgaagctcagacatgtaaactttgcaagactgtgtcccaggaggttgaaatccatcatcaggctcactctctaagcctaaggattagcctggggaccaagcccagccctgaactctcctataaggccctcctcatccaggtcaaggtcatgaggggaacaggtgtatcctggccagcttctagcacggcctatagtaggtctcttggttggtccaaaggaggcctggacttgcatgggaggcaggagagagaagccaccccatctaatccagtcttctccttttaaagatggaaacacttagggccagaaagaaaggatttattcaaagtcacgaaacagctggtgagtggcagagttggggttgcagaacttaggttcctgactttcctctagcagtctctccagaggaacaagtccctgcttcctaaaggaagaaaagaatccggggagtggtggcagtgggaatacatagagcaagggcatctctgaaagtagctcccaaataacctgataaatacctcggatagaggcaaggctacacccctccccctgcccccactacacacaaacaagatcctcagctgaggactcagagcaggagtaagggcacccctatcctccccatggctttgaaaagaagaaagaggggaaatttggagggatggtcaagttgatgattgaagagacaaagtagtgtaggaaaatctcaatgtttcttgcacagtcatttgttgaaaatgtgtcagcaagtacaagcccatcttaaactggcaatgagacatctgaaatagattatttaagccagggaggcagtattgcaaggaagaacatggctatcaacacttgtttgtctgactcagaggaataaaacatagtaaattttgccttagcgggccacccacattcattgggggaagaaacaattgaggtggggggaaaacagaacagatgaaccttcatggagtttcacaagagtccacatggttgtgtcccttattttcagaaaatgtgaaattggaaaatacgcacttgtgaaagctgaagatgtcacagaaatcttcagaggatttatttagatggtcgtatcctccgctgtcaactggatgaatcagtgtgcaatattttgatgtgaatgtaaccgcctattgggccccatttactctgtgcccaccttgggctttgcttctctctaagcatctttacctgctttttctttttatctaggatatcctttctcttggctctccaggtttaactcataagttttcctctttcccaaagcctctctccctcccttccaaatggaaataatttctcttcctttgaatttccatagcagctcatctgtacctctctcatgacacactttctacatgggggtagagcaatttctgtgcaggccttaccttttctactaaatgaagcctgctgtgggagaaatctgtgtccgtgttttctttgtactgcccacagcggctagcccattgctttgggcattgtaggcactcggtaaatatttgttgaatgaatgcatgagaggttgaatgaatgcatgagagaatgaatgaatggaatttatcctgggaacacacattttgcatagtgaggtatgtgattaaacaaacaaaaaaaaattgtcctaagacaatttgtctttttatgcagctgccctctcagtctcctagataagttccgccattctaaggcaaaagcttaaagtgtaataaaaatttatctaattcacgatcaagtgaaaatactttgggcccagagccaaagaatattattggagtgaactttttttaacaccctaaatttaaccagctggaattctttttttaagtaccatcctattcaaccttttgaaatgaaggatttgccttttagtgggaaatctgcatttcaacacaaagatggaacacaatgtctttggcttagttgcttttcagaaaagcaagattttttttttttggaattatatgctttgcttatgttaaagacacagcttgcagaaaaattttgtttaggcctgacagattggtggctggcatttttatagataaaggggcacgcaaaatgtcatctctacttcctccctttattgagaaaaagcctaggaggagaactcttaaaaggtgaagttagtaacctgttgtttgagtaatcaaggctctaagaggatagcattgatcaaaaaagagttttaaaatgagtgattgatgttattaaagtcactggtgaagtatcaaggaatctaaggaccatgagagagtttcagggaagaaattctatattgtagtgtctataattattgctttcttttgtttttgcagaatacactttttaaagaacatcaggatttggtaaaacagccagtaaaaaagcaatgaaggaaaaaaaatgcacatgtaaatgctcatttctagaacaaaagagagtgcgattttgacaatatcagaaggttaattaagaagtctgtgagtgatgataaagctggcacattttcattacagattgacacaactcaagtcacaggcatagctaatgtttgctctataatactctgataagtcagagaatctaagtgagaagaactggtatctatggtaaacatagggtcaagagctagatgcggctgaatagaaaggacatttactttgcagttaggtaaagaagcctctagctcagactagctgcactgttgttatttgtgtggcttgaacctagtaatcggattcagaactggaatgggttccttcagggtactttacaaacgttcaggatgcattttaagtgtagtctagaaggtggtacatggaagagctgagggacttgaggattatggactgcgaaaggactgtaggtagtcctgtattttggcctgtcaccaatatagagacccctcctcatcatagtgtcatccattctctttttgaagacccagggtgaaagaaagggggtcacagtgtcacgagatagcccattccacgtgggacagctctactgcttttgtgcctgtctcactgaaaaaaaaaaaaaaacagggaaattatctaaaaacatatgtttaggaaatatacacacattcacacacgtacacagacacatatgcacacactcacatatacacacacatgaacacgctaacacacatgtgcatgcacatgctaacacatgcacaagcatacacacacatgcacacagtcacaatatacacacatgcacatgctcacaaacacatatgcatgcacacgctaacacacatatgtacacataaatgcttgcaaacacacacacacgtacattttagtgaatagcacacatctatgtactcctgtggagagtcctgtggttttaatacctgttaaagttgggctcccaaagcagtcattaaacgtgttggaatgatgctttttgcttagctgttttggcacatttggaaatctgcagtattacctgttgattagtagacagtaatgtggctgtattacacacccagtgattagtttcagaaacaaatagcatgttaatagtcaaggaatctttgagatgttcttgaggaaaccaaaaaacttgatttaatgacttaaattccaggaacatcccactgggcttagagctctttgtcaaaagttggtacccaatatatgtagaaatgtaaagtgaccaaatgtataacattaaatcaaagccattcccagtttgctgcatattttttaatgaaacctgaaaaataagagtcactatttttaaattcagccataaggaaactttgcaacctaataatgtgtaaggcatttctgaggccccaagtggaaatactgggtctagagagacctttatgaaatagaacaggttgaaacaccttccaccagaaaagtgtaagacatttgaaaaaagattgagtcagaaaagggaaatgtgtcccatttgagagaccagaaagggaaacaagagtccagttcctgctgtgtccgtgcagttgccacagctgcgttcgctgacatgtcggctttaatggaagcagtgaggacacaatctgtctggcacaagctggtttgggtgttgtctcatgctaagaaggccctggacctgatggagagcctggacctgttccctgtccttatcaatgacagacggagggtggaacctgaatttcctaatggagggatccttagggattccctaagcttaatttgtttttgactgttccagtcctaaaggaggtgggtcctggacaggagggaaaacagcctcatggcccatgggtctctgcccagggaatttcaaagcttccagcgttcatacttcccttaccctaagacagcagtgctgattcagcttgagtgtgcatgagaatcacctggagaatttattcaacatagaaggctgcttccccaccctcaatttctgattcagtaagtctgaggtggtgcccaagaatttgcattttgaacaaactcccaggtgatgctgatcgggggtgggcctgggtctgcgctgtgagaatcacttgcctaagagcactaacaaagaaaaaaagaggacataactagatcacccacttcctagccagcaaccagagcccatctctggctggggagaatgaaagcgaaggtgggaaaagaagaggccctcaaccaggggcagctccttttccccaccttggcctgggaaggcagagctgctcctcgagtttgacgctcagaagcattaattgtgatactttactttgcctaagccgtgatgaaataattgaaggcatcatagcaagaagttaagccctagggaggctattaacaatttagcatttccagttcatgtgggaatgtcgattttacttaccaaagagaatattatggatgtgtttagtggaagaagcagcagaatcagctggggtccccagttggctttgctttgaccctcttcctgaaggaagataaatgcaagggtgagtctcacaaagacagtgtgctttttttctaaagtaaatagcttcttaggctgatagaaatgtttttagctgtctaattctgcaggggaagcagaggtagagggtgaacacagcaaaggtgaggccaggaggcccaggcagcagagcaggccttgttttccaattgtgagaccaagtcagttcattggcacctttcgaaagccccatgtagcgctgctgggctggaccctcccccaagacggttaagtactgcttaatggatcagtagaaacaggaccttcttgttgggcagtgaagaccacggcaggagcagcaggggggaagagacaaattcccaggaaagaccactggatcaggagtcaggagattaattctaatcttcacattgtggttaatcatcagtgtagccatgggcaagtcacttaatttctcatggcctcagtttccccatctgtaaaatgaagggacagacttgatgatagctagggttttttacaacttagaaaacaaaaacaaaaacaaaaacaaaaacaaactatgctgccagatagtcagatgagacctcactttgccacacggccagacactgtagagatctggtcctgccgtcagcttgtttagggctaatgggtttgtagacaagtttgccaacaagagattcatgcgaggggctaggcatggattaggttagcagttctcccatttcttgctggaggcctgctgaagcacttcagggtctcttcccagagtaagtggcagagaatttgaaatttgatactccccatacaaggatccaagtacctgttgcgtttatgctgggatcacagagatacctgggttgcctgtgtttcctaagaaaaggatgtctgttttggcagcaaacttagtgaacggctgaggcaaaaacaagtgcaaagatggattctcagatttctcattgaaaaataccatgacaaaatctgtagtaattttacgccacactctcaattcacttgacgtaaacagtcaaatgtagacatacttgtttgttaagtccggtcttcctgcttgtgttggttcactttgtggtgtttattttgttttgggtcagagaggatgaaatgtctctgtagatgttctcaggctaggtggtgcttccaccagggcttccctctgcaggcctggtaacagcagacctatgctgtctgtgtaagagccttctcagcagcacaccatcgttacccaccaggctccttgcgaaaggaaatcttgtcccaactgccttggctgtgcttggcagtgtgctctatataaggagaacaggatgtattttacacttgagacctgctatcctagagtacaacaacaacacttctaagtgctcttaatattaagctaatggaaaacatactgtttgttcaccatcaaagtctgtttttcttgtctcccgccctccccaatcatcatgaactccaaacctctagaacacacagagcgtctcctgcaccatctatcctccagtctgtctcaagatggacagctacatggttagttagctagaggaggacttggaaaagctaggcacttaccacataaaccgtaaaatccccagattgcacaaaccaaattttcctcttctcaaaaaaatctcagtgctacaaatgtttcattgactattagattcattttattagtgtgagaagtcacttgtcttcaccagagtacaacaaagtgcagtaaaatggtgaagatgggtcagggtttctgggtgctggcattattggaatgctggttctttccttgtcatttaatggtcaaagttatttggaccccagaagtctaatctttatcttccattgctttgtattgtgagaagccacatctgtgtaaggtttccagttgacaggattctagagtatggcccagctcagtccagaaatgcccaggtttcccctatcactgaaggcgctatcataaatatagcatgggaagaggggggcagagggacagagaaagcaaagtgggactctgtcccataaaaaacgattcacaaatctactcatttcctatcagcattttgctttttgcttgggtttgtctataaagtaaagttaatgtatgcatgtaaaccagccttgcagataaaatccccccatgtttccaggctacccacaatattaccagttttccccttgctgcttacacatcttctttccacaagacaataatcaaacaacaacaaataaataagcaaatgaaccaaagaccacctctcccctttcctaaaacaaaccctttcacttttgtcaaaaagaccgaaattgaaaacaaaacagaaactctgggaaataactcaccactcttcttttgtttcaggccttgggcctgttaactatctgcaaggctgttgtaatgatgttgtaatctattttaatggaattgaaatgtgatatcctgtggtttatgatgcacgttgtttgtagctgtagtgcttgattttgggtttctttcacagataaacttctgcactggaggggcctctcctcccctcgttctgcacatggagctctaatccccacgcctgggatgagtgcagaatatgccccgcagggtatttgtaagttgagccttatttcttctacaaatgtccatgtgtatagagatgagaatttctggaaattgcccttactttttaagtactgaaggagttacttccaaaatagattgtcatatgtattattccattactcacttggcagccgctccccactccactcagccccagagggacttcttccctcccctttttctttcctcactggaggctgggagctgatagtagctcatccctgtgggtcttctccccagggtcttgtcttgctccgtggctagtgattgaagatgcctgtgcctctggagcccattttattactggacattcactcctgtggcctcatttaggactttgggtatagtccatggcacacatctttagccaaggccagaatcaaaaggagtcagtttagggttattccagagttattccaatgcatattccttatgtatttacatgtgtatttgaacatagtatatgttgtatattcatgcccacacataattttgactaatttttctcctggttttagagaaaaatgcacatcattgtagttaaaatgtgaaggctctactatcaccaccaccaccaccaccatcaccaccaccaccacaaccaccactgccaccatcaccaccaccaccacaaccaccaccatcactaccaccaccaccatcaccaccagtaccatcaccaccatcaccaccactaccaccaccaccaccatcaccaccaccaccattaccaccaccatcactaccaccaccaccatcaccaccagtaccatcaccaccaccaccatcactaccaccaccaccaccaccaccattaccaccaccatcactaccaccaccaccatcaccaccagtaccatcaccaccagtagcatcaccaccaccaccaccatcaccatcaccaccagtaccatcaccaccagtaccatcaccatcaacaccaccatctccaccaccaccattaccaccaccatcactaccaccaccaccatcaccaccagtaccatcaccaccagtaccatcaccaccaccaccaccatcaccatcaccaccagtaccatcaccatcatcaccaccatcaccaccaccaccattaccaccaccatcactaccaccaccaccaccatcaccaccaccaccattaccaccaccatcactaccaccaccaccatcaccagtaccatcaccatcaccatcaccaccagtaccatcaccatcatcaccaccatcaccaccaccaccattaccaccaccatcaccaccaccaccattaccaccaccatcactaccaccaccaccatcaccagtaccatcaccatcaccatcaccaccagtaccatcaccatcatcaccaccatcaccaccaccaccattaccaccaccatcactaccaccaccaccaccatcaccaccaccaccattaccaccaccatcactaccaccaccaccaccatcaccaccaccaccattaccaccaccatcactaccaccaccaccatcaccagtaccatcaccgccatcaccaccaccatcaccaccaccaccaccaccatcaccaccaccaccaccaccatcaccaccaacaccaccatcaccaccaccaccaccactaccaccaccatcatcaccaccaccaccaccaccaccactgccaccaccatttacttgttcaagtgagcttttatagtagggaccattttatgaaacttaaatttgtccatttatacaaatgttttctgaaagatactgttttagaaaataatacagtttgcttctctgtgtaggaacacatggtatgaatcatgcatggctaaaaggttagggggtgggcagtgattccaccctaaacacaaaaaagcaggttcaagaagaaaagaagtgtgacatctaatttttatttgaaagtaaatgaaaaataacctgctgtggaaagaaaaaaaaagaaaaggaaaaaggtcatggagagagaataacaaagagcaagatgccagagttaaggctctaagggggactgtttttagatgggagggagatgacacttacccatcttgtaaatggtatctgaagagcagggcatgcaccctgagaccagattcaaagccagttgtttatttttgttaactcctaggtaatcctaggtaacaaagagttattgtgtgaatttcataagccctcaggtcctgagggctgggtggttcaggggttaaaagcacctcatctgctcccttcccccaagctgggcctaagcctgggttaggtcacagattgcagaaggtttaggaggttgggctcacggtttctagtccctgcatgctggctgggtggggagagctctcctgttgctgggggcatctggggcctgcatggggctgtggaaacggagccacttttggagggaagggatagaagggagttgagcagttcagaggagggtggagttgagaggccaagggctgttgccagggaaacatagttctcggtcttcagcctggtcttcctgagggctgggagtttgatttgactggtaggaaagtctgagcttgatagggaacccctgtcctctcccaccttcccacaaagggagggtacatagtttgctggtgcccctgctggcaggaccaatttaggagtgaccagaacaaggtatgtggaagtgggttgtgggggtccagaaagctctagaacaaacctgatgcccattccacttggcggcattaacctgctgcccctggcttccagagctcatagcacttccctgtggccactctgctgtgtgccagtcacccctgctctttaactagagcctccttttggcctgggttaaggcctggactgggaccttcctctggaagccgttcggggtgtgtaatgtggttagtcattaccctcagtaattaatcacccctggtagtaatgaaaactcacattcacattcgacctgatagtttacagagggcttttatatacttctgtcatttgaacttcccaacaattcttacaggtactgtttttatgctcattttacagataggaattccaagactcagagaaatcaaatgactatcccagagttacaatctagtggataatagagctaggcctccagtctcagacctccttgttcttctgaatcttgaggcttagatcacatgactttttcacattggtgacatactagaaatgggggtcattccttcccataaagtaaaatgaaataaaataaaagccagtaggtgggctaatagctgattttaacccttttgatgtctcaagttcctatgcttaggggccaggtgtcagtttattgctctaaatcaaaacaatccccgtaaatgcccaatgaggctctcaaattgagaagttgattttcatcagagtaaatgaagaatattattatattttacacatcaataaatcaatgtagccctaattttgccacacaggaaatcaattccagtctttctaaatcatcaaagatgttatgaacaaagtaatttcacaaattatggcaagtaacacatttattgatgactgcagtttaggaatttagaatctgtgagcactgtaatataatatggtacaccggcatgagctgagtgaaatacagattatatggtgaaattgtaatgcatcatttgctattagtggactggtaataattaccagtttcaaagcagctctctccatgtaatctttagtctcaatcgtaacagcccttctcattgacattatgattacactagctgccctcatgatctagaatatctagttgatgggaatactaaaatgcgatagtgaaaactgtatgttgtatgctcattataagataaaatgccattttctctgacctgatgtatgagagagaggggaggataacatcacagtgttaacatactgtagcatgatcacataactggctctgaaaaaaagtttaggatgctcagggcagcaaaataaaatggacttttctcatttaagcctttttgaaaggatacaaatgagatccttgatgtagtgctgtatgccacagattttggcatttatcaatgactacaattcatggcacatgtgaaaccagcaccactaattatgagtctagtcctggatttcaatcgatgttttataaggtaaaatataattttaaggcatttggagtgatgaacgtgttaaggacttggattatcagacaaatctttttacttgcccaactcagatcgtcaggctaaataggaatgatagtcacccagagatctagggaggacaaggaggaagccacagaggatcatgtagttggaaccagatagttttttttccagcctatttgggacccaagttattgttcaacaacaacaaaaaatttataaaaatgttctcaatgaagctttttatttccctttgaagagaggaggcaaacaaaaataggcagataatgtgatactaatgtcagcgttttctttcaaaatctttctgccttttttcccccttccacattagacaaatgtttgaaacctaattttggtatcttaccatctaatcttgtttaagagatttacccaggagtgagatatattgagtgggattataaatgcgttgtaaagtaaattacaaggtcagggcaggagtccattatttagacaagtgcttgagcgaggctggcttattttggaataccagtgtttgggggctcctgagaagaccctgccggcttttctttctgacttgctaaatggaggcatcatataattgattaattcctcattctcactcttaacctccctggtagattttttttttttttccttcttagaaagttactgacaaatactagctgtggccttaaagaactcttgcagcccttcttttaaaagaaggagaaaagtttgttatttctcagttatattttaaggctttttttttcagaatctctgggaagttttgtttttctcatcctcgtcctttggctaccattacttctgccctttttaatgttgcagttgactagtaaactgttggtcagttattccatatatatatatatttaatgtagctatctccccatatatatttaatttagccatctccccaaatgaaatattttgtgaagtcaagctggcccttctttgccaaagtggcatttaccactcttgggttcttttcagcaagggaaataatgtgacttaagcagggcccctctccagacggcttggctactggccagagttgactagctgaactgtatctttctgtttctttctcaactggagctgagtcccagccgagggcgcaggatgttgtataatttggttcacgttgttagcctctcaaaacaatgaggaggaggatagtgtagcatttctcagcctgctgcctgtcatggcgctggctgttttaactgttccttaaactaggatgctgtgtctgcttaagtcggcaccagccactcctcctaacttttccagacttgcatttgtctgaccgggggacaactcctaaagattggatacagcctatccgttaaatctgaatgaagtttttctttcagattttttaaacattctttgagataaaaatggacgtccccatggggtgttgtggaaccaaaattgggactcactgatcctcccacagtctggggtgtgagaatgttgctagtcttttttccacggaagtattttatgagtaccctctcattttaacaatatcaacaattagtgtgtttcaggctaatgctgaaagcatctttagggccatagaacattgtagtgagttgaccttcttccccttttttgatacctctatgaaatgtttgcctatttagaaagttcacctgtcacccaggggggaatagaaagctgggatttaggaagccaaaaagtttccttgggtcaccttgtccaagtttctcacttaacaaggaggaaacagaggcacatggagatgagatggcttgccccaaactacagctgatggaactggaaagtttagaagacatttgttgaggtgcctagaatgtagggaccttcatcctcaagccagaactggtcaggatttttctgctttggggattggatataaaatttctagaactgagtttaatggcaggaagatcaattggaccaatatttactgggtacccatgctcagacgtgccaggcacagggggtaggtcagtgagggcttaggccttggggttgaggggtgggggcagggaaggctggaggtggaacataaataagcaattgctgatgcccgcctcagtgattaaacattgatgttggtgttgtattattttgcaggtaaagatgagcccagcagctacacatgtacaacttgcaaacagccattcaccagtgcatggtttctcttgcaacacgcacagaacactcatggattaagaatctacttagaaagcgaacacggaagtcccctgaccccgcgggttggtatcccttcaggactaggtgcagaatgtccttcccagccacctctccatgggattcatattgcagacaataacccctttaacctgctaagaataccaggatcagtatcgagagaggcttccggcctggcagaagggcgctttccacccactccccccctgtttagtccaccaccgagacatcacttggacccccaccgcatagagcgcctgggggcggaagagatggccctggccacccatcacccgagtgcctttgacagggtgctgcggttgaatccaatggctatggagcctcccgccatggatttctctaggagacttagagagctggcagggaacacgtctagcccaccgctgtccccaggccggcccagccctatgcaaaggttactgcaaccattccagccaggtagcaagccgcccttcctggcgacgccccccctccctcctctgcaatccgcccctcctccctcccagcccccggtcaagtccaagtcatgcgagttctgcggcaagacgttcaaatttcagagcaacctggtggtgcaccggcgcagccacacgggcgagaagccctacaagtgcaacctgtgcgaccacgcgtgcacccaggccagcaagctgaagcgccacatgaagacgcacatgcacaaatcgtcccccatgacggtcaagtccgacgacggtctctccaccgccagctccccggaacccggcaccagcgacttggtgggcagcgccagcagcgcgctcaagtccgtggtggccaagttcaagagcgagaacgaccccaacctgatcccggagaacggggacgaggaggaagaggaggacgacgaggaagaggaagaagaggaggaagaggaggaggaggagctgacggagagcgagagggtggactacggcttcgggctgagcctggaggcggcgcgccaccacgagaacagctcgcggggcgcggtcgtgggcgtgggcgacgagagccgcgccctgcccgacgtcatgcagggcatggtgctcagctccatgcagcacttcagcgaggccttccaccaggtcctgggcgagaagcataagcgcggccacctggccgaggccgagggccacagggacacttgcgacgaagactcggtggccggcgagtcggaccgcatagacgatggcactgttaatggccgcggctgctccccgggcgagtcggcctcggggggcctgtccaaaaagctgctgctgggcagccccagctcgctgagccccttctctaagcgcatcaagctcgagaaggagttcgacctgcccccggccgcgatgcccaacacggagaacgtgtactcgcagtggctcgccggctacgcggcctccaggcagctcaaagatcccttccttagcttcggagactccagacaatcgccttttgcctcctcgtcggagcactcctcggagaacgggagtttgcgcttctccacaccgcccggggagctggacggagggatctcggggcgcagcggcacgggaagtggagggagcacgccccatattagtggtccgggcccgggcaggcccagctcaaaagagggcagacgcagcgacacttgtgagtactgtgggaaagtcttcaagaactgtagcaatctcactgtccacaggagaagccacacgggcgaaaggccttataaatgcgagctgtgcaactatgcctgtgcccagagtagcaagctcaccaggcacatgaaaacgcatggccaggtggggaaggacgtttacaaatgtgaaatttgtaagatgccttttagcgtgtacagtaccctggagaaacacatgaaaaaatggcacagtgatcgagtgttgaataatgatataaaaactgaatagaggtatattaatacccctccctcactcccacctgacaccccctttttcaccactccccttccccatcgccctccagccccactccctgtaggatttttttctagtcccatgtgatttaaacaaacaaacaaacaaacagaagtaacgaagctaagaatatgagagtgcttgtcaccagcacacctgttttttttctttttctttttcttttttctttttccttttttttttttttcctttatgttctcaccgtttgaatgcatgatctgtatggggcaatactattgcattttacgcaaactttgagcctttctcttgtgcaataatttacatgttgtgtatgtttttttttaaacttagacagcatgtatggtatgttatggctattttaaattgtccctaattcgttgctgagcaaacatgttgctgtttccagttccgttctgagagaaaaagagagagagagagaaaaagaccatgctgcatacattctgtaatacatatcatgtacagttttattttataacgtgaggaggaaaaacagtctttggattaaccctctatagacagaatagatagcactgaaaaaaaatctctatgagctaaatgtctgtctctaaagggttaaatgtatcaattggaaaggaagaaaaaaggccttgaattgacaaattaacagaaaaacagaacaagtttattctatcatttggttttaaaatatgagtgccttggatctattaaaaccacatcgatggttctttctacttgttataaacttgtagcttaattcagcattgggtgaggtaataaaccttaggaactagcatataattctatattgtatttctcacaacaatggctacctaaaaagatgacccattatgtcctagttaatcatcatttttcctttagtttaattttataaacaaaactgattataccagtataaaagctactttgctcctggtgagagcttaaaagaaatgggctgttttgcccaaagttttattttttttaaacaatgattaaattgaatgtgtaatgtgcaaaagccctggaacgcaattaaatacactagtaaggagttcattttatgaagatatttgctttaataatgtctttttaaaaatactggcaccaaaagaaatagatccagatctacttggttgtcaagtggacaatcaaatgataaactttaagaccttgtataccatattgaaaggaagaggctgacaataaggtttgacagaggggaacagaagaaaataatatgatttattagcacaacgtggtactatttgccatttaaaactagaacaggtatataagctaatattgatacaatgatgattaactatgaattcttaagacttgcatttaaatgtgacattcttaaaaaaagaagagaaagaattttaagagtagcagtatatatgtctgtgctccctaaaagttgtacttcatttcttttccatacactgtgtgctatttgtgttaacatggaagaggattcattgtttttatttttatttttttaattttttcttttttattaagctagcatctgccccagttggtgttcaaatagcacttgactctgcctgtgatatctgtatcttttctctaatcagagatacagaggttgagtataaaataaacctgctcagataggacaattaagtgcactgtacaattttcccagtttacaggtctatacttaagggaaaagttgcaagaatgctgaaaaaaaattgaacacaatctcattgaggagcattttttaaaaactaaaaaaaaaaaaactttgccagccatttacttgactattgagcttacttacttggacgcaacattgcaagcgctgtgaatggaaacagaatacacttaacatagaaatgaatgattgctttcgcttctacagtgcaaggatttttttgtacaaaacttttttaaatataaatgttaagaaaaattttttttaaaaaacacttcattatgtttaggggggaactgcattttagggttccattgtcttggtggtgttacaagacttgttatccatttaaaaatggtagtggaaattctatgccttggatacacaccgctcttcaggttgtaaaaaaaaaaaacatacattggggaaaggtttaagattatatagtacttaaatataggaaaatgcacactcatgttgattcctatgctaaaatacatttatggtcttttttctgtatttctagaatggtatttgaattaaatgttcatctagtgttaggcactatagtatttatattgaagcttgtatttttaactgttgcttgttctcttaaaaggtatcaatgtaccttttttggtagtggaaaaaaaaaagacaggctgccacagtatatttttttaatttggcaggataatatagtgcaaattatttgtatgcttcaaaaaaaaaaaaaagagagaaacaaaaaagtgtgacattacagatgagaagccatataatggcggtttgggggagcctgctagaatgtcacatggatggctgtcataggggttgtacatatccttttttgttcctttttcctgctgccatactgtatgcagtactgcaagctaataacgttggtttgttatgtagtgtgctttttgtccctttccttctatcaccctacattccagcatcttaccttcatatgcagtaaaagaaagaaagaaaaaaaaaggaaaaaaaaaaaaaaaccaatgttttgcagtttttttcattgccaaaaactaaatggtgctttatatttagattggaaagaatttcatatgcaaagcatattaaagagaaagcccgctttagtcaatacttttttgtaaatggcaatgcagaatattttgttattggccttttctattcctgtaatgaaagctgtttgtcgtaacttgaaattttatcttttactatgggagtcactatttattattgcttatgtgccctgttcaaaacagaggcacttaatttgatcttttatttttctttgtttttatttttttttttatttagatgaccaaaggtcattacaacctggctttttattgtatttgtttctggtctttgttaagttctattggaaaaaccactgtctgtgtttttttggcagttgtctgcattaacctgttcatacacccattttgtccctttattgaaaaaataaaaaaaattaaagtacacattgtaagcttcttgtgtcctcatttgacacactctgtaaattacttgcaagaaaataacaggttttaagagaaggccagtcagtctttttcaggattatttctatgggcattctgatgcgtgtattataccctaaaggaacataaagtacttactatattaaaatagacatatctcaaaccctggacatagttttaaggctttccagtttagaatagttttcaagaaatggaaggtgttttcagtctgatgttaaaaacttactccatctcttagcagaaatccattcaaacataagtgaaaaaacttgctggtaatagcatcttaaacttttatttcctttaaattttttgctgttcttgttgtctaaaagttcttttctattctcccatccttgctttatcttagaacataatgtaaaaaagatttttttaaaaaaaatcagctctttggtttccatgtaagagtcttttctcataacaaaataaccccacttttgaaatctaaaaatctggaaacaaaggcatcaggttttgttttgttttgttttgttttgtttaaaaaagagggagaaaaaaagagagagacgaaagaaaagaaagcagccactaggggtgtagccagacatagtgaaatctttggaatcagccactgatttcctgagatgcatagtggtttgccttgtggttctgagatcccaggaaccctagatgctacagattactttaggtgttttgatagggtcttcctggatgacagcaaataagggcgggaatacccttcaattatcttctgaccagccagttaggtctattttaaaaatccttagaaatctgtgttgtcacttttacaaatactgcatgttgcagcatctatttgctttactaaacacatacctctgtgatatcgtgtccctgttcccagtgtagatgaatgaatacgacattgttcttatttttgtaaaaaaccaaaacaaaagccgttctgttgtcttcttgtggtagcattttttgtcgctcagttcttatgccctagtgcctgtgaggtggccttttcatgtcatgccttttatctgaggcaagaatagttttatctttctaaagtataaagaaagtcaatgttttctgaaaagccagtttgggtgggaaggagagagtggggctagaggaatccactgagaaaggatgttggagaatattacataggaggtggggtggggtgggcgtgcggtaccttgagaacttgatgtttgtcactgaacttagaaaagatatactgtatgtgttttggattaggtttctccaaaactgaatccaaaatgctgctcaagacagatagaaataattccccagtgccatgccagctttagatgtggtgacttcgactccaccctattaaatgtccataaaacctctgtgtgtccctattactcttttattaggagctatgagtgcaactgtgtaggttttatatacagtattcattttaatttctcagtatatgctgctcttagcgtaattaggttttgcatcctgacagacagaattaatggtggatactgtacacttgtctgttcaaatttcttaaatcaaatggggaatggggaggagtgcaaacatctggtgataaatcacagattatgtttgatttacatggtcccaaagttaaataaatttactgggagatgggttcttcaggttacttagtctcctgacttattgacgccttctgataaaatattatttctgaagctgatgaacaatagaaacatgagaacctagccaacatgatatcacttataaatgatattttgtatccagaactctaaaatttaaaatcttaatataaaataacatgcacatttccaatagtaagatgaattcatgatcttttttttttaaatgaggaactactaagaacattaatgtctcttaaaatcctcaagtaagtttttgtaacaggcttgacgtgctgatggaatgttctctacatacctgaactgatgcttaaaatgttctttttaatcttcatttgagaacaacttaataaacaggaataccgcaaattctatttctcacagattttaaaccagaaactcttccagtgcctatattacctccttcctgaacccatttgctatcctctctttgtttaggacctacaaaaaggctggaaccaacacattacaaaggttgctaagaagtgaggtgaacacagttcttcatttgcactggccatggcagaaagtgtgaagtagttgagtttttcccagggcattctgtagatatagaactgtttatttaaataccatttttgtatatgcaataagtacatattgtatataatcataatgctagaagtgagaacttgaaaggaagtggcgggagatggcttaggtataattccaattggagaaataaggaaatgaggtggtttattcacagacacagtttgctgaaaggtactgggattatttcgggccttcctgaaaaggagttgagaagcctcaggccccatcctctcctgcttgtagtactttgctcacagagactgagggaggaaatacagtgttttcttgttttaagcctcttttccccctccgtacacacatgaacatgacttcttatgactgtgttgtaactgtgtgttcctcattacgattctgttactccattgtccctgggcctggtgtgttcaggaatgtacccatcccattctctttttttcagacaacttcccataaaaaaaaaattgtgggaactttgccgatatgaggatgggattggcagagttctctcaacctgcttggaaaaatgtttcttaaaagactgctaacttttaaaaggcatgagccatctagcagattttcctagttgtctcctaaagccctgcatatttcccaatagaaaataaacgaacccattgttagagaaatggacatcagaacacatagagggaattggtatgatgtgtatttactctagggctgctatagctatgaactgtggacatgggttgtccggtctgcacttctgcttgctggcatctcgttatcccattagcccgctgtttaatttactacatacagcacgaggccagtgactcagcctttaggggaatggggctgtttctctctctctctctctctttctctctctctatttcccagcgtcatctacggtcatgggataccattaattcctcccttccaaatgggaaagagaccaatccagttcacacgggtcattgtacttgagaacctaaacttggctgaacacagctcgatggttgatccaaatacgtttttcctttctgtaaagtggcaaaaactatttcaagggagcacgtgtatcagatctttcatagggatggtagaaaaggcaaattaagccatttccccaagtatcctctaaagcgggagcccctaaacccataggggggctgtgcttttaaatagctgtgaacgtggtacatgcccatgatatactttgtctattagaatttgaatattggtagcaggttggacgaaagggtttgattggggtatcagctaaaggggcctcgacgacagtgacttagcgctggactgggaatgggattccccagaacccacctggacgcagcatgcccctcagcccaggtctccgctgctctgctcaggggtgggatgcgtgagagcagctgagatccagaccccgggcctcctgcggcgccaagtcaggggagaggaggccccaggcccctgcttcgggtcgccatggcaacgaggcctggaatgccacagtggtagccctcttcctcggcacatccggactcccagttctgctgcttcaagtcaatgtccacagcaagggaggaaccccggaggaaaataaccactcccttcttcccttcaccattgccttcccccttccaaaaaagaaaagaaaactgcatgtttgaaagaaactacaggcagtttttggtgcaatttgagagcaactcttttgggttctggttttctcttcagagatttgttcgcctcttgtaaatcattggctgctttgacgttgaacttgatgacatttcatgttttcgttgtgctgcttttacatcagttttgattttttgtttctttataattttattattattttgagaaggtgtcccctttccctcctccctctcccgctctcctcaaccaaaggactgtttcttactaagttttctcagtcataagggcaagtgtttccttccaggtgtgtcccgagtttattaggactatcatacaattgggcaggggtggggggacctgggtcctccttggggggacggaagggagggaggcatgggaagacgactcagaggtcagagatacttggggaggggaggctgagtttgaaatcatgcttaagatgccagtggctcgacctgtggttggtttaagttctaatttttaaaaagctagttagagaacagaaaatcattgggccaagtcacacctgtactttttttttccccctcctctgtctccaacctctttctaggttcttcacacacccccattcggcgtagtacccagagagctcaagatgtgtggcagttttcggatggaagctcgagagcccttaagttctgagaaaatttgaagcccccaggggtggggtggacgcgtgccgcccagtcgacgtcagcgtggtctgtcatcctgctagtttgtgatgttttctgacagtagcctccaagaagccgttgtgcgaagacagagtcctgcagagtccttccagcctaggcctgcagcgccattttatttatattttttaataaaaagtaaaaacaaaaaaacagacccacattggaacagtgaatcagtcccatagagagggcccgtggaccatcgctgtcatgagtgatgccctggcccttctgaaaccagccaacctaattacctgtattgtggaaatgcgcatgagtccccaaccccttgtttctatacattctatgttgtcttttaaaaagtgtgcttaacattgacacaataaatgttggagctttaggtggtgtttgcttgttctttaatttttaatgcttataagacaatgaggctgcttatgattttgtacttctgtacctgtttcctacagacacccatcgggtgggtaggaggaacagatttgagaaatgggcaggagatgtaggaggggaactaggttaccgcttatcagatggcataaattttcaaggagaatcaaaatgcaaaacttgggaataaatcatagcaatatcataattaatgtagtagtaatattgctgtttattaatgctgaagtgtggttttcctaactgtctgacttataatttgcataccattaaataatgcataatatggcacgccgaatcctgtttttcaaatatatgcttttggtggctaccatgcaggatttgaatttgtcttttaatttagcttaggaaagaacatcactgggcgagcggtaaatcctaaagaaggtgataaatgtcagtagtttcttattaaatattctaattttaggttcccaaaccttcaggaaatatatcttaatgcagacaaacaaacataaaacttctttagtacttacatcaggaaatttggggcagattttagaggggggaaattataggaggaaagaagttcacatcagaacagacaatcacagcaatgctctattccttagaaattagtgccacaaataagttacatctacaaacaggtggtaaaaattctttctggcccagttaatttgcacagaacttttctcagtttggtattttttactgcttggagatccagaagagaattagaaacaacatagcaaattaaaataggtttgtcaataatagagctcagacacctgtgtgctgtagattcacatacaggccgtgaacctaagtggggaaaatcctacctatccaccttctggctagattacctagcttagtgaaaagatagccaaataattggcatgtgaattatttcctgcttattcataataaataatgactgtctacagtagtgaactaccttatactgtatacagtgctgtctcgtgcattatttcacctgctctctgggacagatctcacgacttctactttatggaggtggagattgaggcttaccaaggttaagggcttgccagaggccacatcagtaagagagaaagcagagaagccaggttttctggtttcttgtccagagctaatttcaccaaactctgtttaactgatcaaagggagtatcttttcctgtgttagcacataagtcataaatgttcacagacacacacatgtggcttacacatacagacccaggatggcctttggtaaaggcatgcagagttgcctcttcctaccaacagatgtgtgcactgagaaagggaggttgcagcctccttgccatcacctttcccctgtggcttttccatgacaaataaccctgattgcacgagtggcctgtttgtgacttcctatcaattagttgggacttccagacaagaagttatttcataaagaaaccctctccctgccccatgctctgcctatgtgttgctgaaacataagaccattagggtttctgtgatggcttcctccctaaatgtgctgaactccttgctgatgcctagaaagagtgacaccacttccaaagggaggccagaactgaaacaacaatcctgggtcttgagacaagttcagcctttgtaactgcacttggtggtcactacactttcatttctggtctgtgtttctacccccactttttatatatttcttctcagagtcagtttgtaaataagtggatatctctaaaagtgggatttttaaggggcaagaggataacagaagtggataaaggatattgttttatcctcttcactgtggagaagaaccccctcaaaacaaacagaacaaaaagactgtcttttcccatggcttttaaagttgaaagacaacaaaaatttatttacagaatttattaggaaacggtattgtgttagggctagccatttttttttttttttttttttttttaagacagaatctcgctctgtcacccaggctggagtgcagtggcaaggactcagctcaccacaacctccgcctactgggttcaagggatcctcctgcctcagcttcccaagtagctgggactacaggcacgcgccaccacgcccagctaatattttttgtatttttagtagatacggcgtttcaccgtgttagccaggatggtctccatctcctgatctcgtgatcc

SEQ ID NO: 837 - DNA, 7860 bp, Homo sapiens
  source 1..7860: mol_type = genomic DNA
atttttggtagagacagcgtttcaccagccaggcggtctcaaactcccgactttctgtgatccgcccgtcttggcctccccaagtgctgggattacaggtgtgagcttccacacccggcctcctctcattttgagcttatgtaaatgcctaccggcccccagtagggctggggcagggttgactttccagtgctgtctgggatggctgggagcaaagaggctgaggactgggcagcatccccctagatggccccatcctgttctggccctgttctggcttccctaactcagcttgggttgggggcagccccaagccccatcccagaccctctgcagctctggcaacagctaggtccagagatgacctcagcctggggagccagtgttcctggggagacagaatctcattgcctcccaccccaacctgagaaagcctctcgtttgggggtggggtgaggttcagggagggatcctggatctactccaagccctgtttgctccactgaccaggagaaaaatgcggaaaaggggtgaaagggtgacatcacccaggattgctccacctctggggcaattatcgggagcagggcggccccagtcagacgcaggcagccccaaagcctgaacaggcagggccagacccaggtaagaagccaaggtccggaagggtcgcgggcgcggggcagggctgaggccccacgtcaggtcgcgtgggtctgcggagctggggtcccccacgaagggtttgcgggactcgcatccggccttggccttggatgtttatgggtctgtctgtgggtgagcctgtgggtcccggggctcccgaggcctgtgcggctttcaggtctgggggtgctgccggtgcgcctctgtccagggaccagctcctctgtcccgggtgggtgtgggaggcggacccggtggggaggggcggtggctgccctgaaaccagagctccctctcgccggtacccaggtctgtgtgaggcttccggcccccaggctcgggcctgcgcccagcccaccctacacccctaggcgtgtgcccccagccgtgcccagcaggggcggagggagggcagaagctttctccgggcggcagcggagggcggggctccagcgcggggggccgggtcaaggacgggggcgggtcccgagggcacggccgttccctgcgcgccccgattggtcttcgtgtgccggccccgcccccgccgtgagtcccacacttaaaagcgccgcctccgcgccgcccgcgtagcttcttcgcctccgccagcggggaccccgagctagagccgcagcgggacctgcccggcccccggctccagcgagcgagcggcgagcaggcggctcacagaggcctggccgcccacggaacccggggcccggcggccgccgccgcgatgtttccccgcgagaagacgtggaacatctcgttcgcgggctgcggcttcctcggcgtctactacgtcggcgtggcctcctgcctccgcgagcacgcgcccttcctggtggccaacgccacgcacatctacggcgcctcggccggggcgctcacggccacggcgctggtcaccggggtctgcctgggtgagcggggccgggggcggcaggcggggggctggcgggaaggccgtgcggggccgggggatggtctccgtgagcggaggggccccgcggcgagtcggtgggtaccgtggggagggttccggtccgcgcctggggaacccggcgaggatccaatccgggtcgctggcctgggggcggggcctggtttgttttgctccgagggtgcccggggcccgcctgtctggcgcaaaggtttgggggcgggcaggtgcagcaaaagctgcttaattggacagaaaaagtaactcgtgggcgggaccgtgagaatccgaggagggacctaagtcaccccgtggccctggatattacaaccggtgccagcgatcggtcacagtgtcctgggcttccgcagttgcaggctgctatcagggggcctggcatgggggtagcctcttgagaggcgtctgggaaccgtgacctggtccttcccaagggcccggaggaggagccccgctgaggtcagggctgggcgcgaaggggctctcctgccctctccttgcacacggtgccctgtggcctggctccccgctgcggcccaccgcgtttgcacacttcatgggtgagggtgcttctgggctctggtgcctgggtcaggagtggatgggtctctgtgtgctgggctggcctcggctcgcaccatcggctgccatgagggagtgatgtttacagcacacgacttcaggagcctgtgaggacacccaagatgacaggggcactctgctcagcaggagcctgtccggggctcacccctgccctcttcctctgaactttgtcctgggagggagggggctggaccacagaagtgaacctctcaggtcccaataactagagctattattgggaacagccccctccagccccctccctctcatggaggccttcagacaagcgcctcagtcggccccctggcttcaagatacatcaaggtccctgctacccgagccaaggacacctctcccacagtgcttccccaccctgctcccaacaagactccttctcacgggtggtcttgcacagctggagcccatagtgcagcaggtgctggctgaagagcccctggctccacactgccccactcctgaccagggtgatgcactggaggagggcttggacctcagctcctccctcagtgctcccgaccacttccagggactatccccaagctggccagcactcctgcgccccaagaggagtgtttggggtgcttcctcttggctgcagtgggacacaggtgtgccttcctaggaactgggccctgactacttccagcccaacactcccgggcctgtgaactgtgacctgtgtgccgggatgggttttgtgggtctgccccatccccgcactgctggatctggccaagtgggtgaaggctaaggccggtcagagttgagtttctgccttgtcccctctcctgggctagatgccacaccaggcccagtgactcatagggcaggcagttgggaaataccaggcagagggcaggtcctggtctcagctggccagcctctgctgtctgccatcccaggggaggtggccaaagtcccaactgtgagccaggccccacattcactgggcctcctccagggtctgtatgccatggaaccctggacatggggctatgaaggaaggtgggtgttgctaagcccaggagcatgggcccctaaccttggccctgtgccccaggtgaggctggtgccaagttcattgaggtatctaaagaggcccggaagcggttcctgggccccctgcacccctccttcaacctggtaaagatcatccgcagtttcctgctgaaggtcctgcctgctgatagccatgagcatgccagtgggcgcctgggcatctccctgacccgcgtgtcagacggcgagaatgtcattatatcccacttcaactccaaggacgagctcatccaggtggggcctggtggagccatgctgggtggcggtggggggggcagtgggaacctcaaggcctctgctcattctctcccactctgtccctgccctgaaggccaatgtctgcagcggtttcatccccgtgtactgtgggctcatccctccctccctccagggggtggtgagtattcctagccctggacaccttctatggggtgggccgtgggatgagggacagaggaggaggccgcctagagccatccttcaggcccttgctctgccaccgcctgttacccacttcccctgtgttactcaagaaacagctgtggcaacgcacgcttcctggccccccatcccttcctccgtccctgccctcccccgtctaccatctgctcagtgcccaggctggcccacagccagtgcccagtgggtaaaacgctcaaatgaggtagccactgaatggggcccttggtggccgggtggggtggctggggtgggtggccagtgcagccacaggccctcacatacggtcctgtctgtgtgtcccgtggaagcgctacgtggatggtggcatttcagacaacctgccactctatgagcttaagaacaccatcacagtgtcccccttctcgggcgagagtgacatctgtccgcaggacagctccaccaacatccacgagctgcgggtcaccaacaccagcatccagttcaacctgcgcaacctctaccgcctctccaaggccctcttcccgccggagcccctggtgagctctgctccgaggactgtggccttcccagccactcctcactgggcaccaagggagaacactgatcctttgacttctgagtgcccagggtagggtggtgggagcctcttctgagggctggggaaagcgcacaacctttctaggggcagatggcccatccaacctctctgtctagctgctctgtccaggctccctgtccagtctctctctcttttttttttttttttttgtttgagacggagtctcgctctgttgccaaggctggagtgcagtggcaggatctcagctcactgcaacctctgcctccaaggttcaagctattctcctgcctcagcctccccattagctgggattacaggcgcctgccaccatgcctggctactttttgtatttttagtaaagaaatagggtttcaccatgttggccaggctggcctcaaactattttatttttttattttttttttgagatgaagtctcacactgtcacccaggctggagtgcagtggctggatctcctctcactgcaagctccacctcccgggttcctgccattctcctgcctcagcctccccagtagctgggactacaggtgcccaccaccacgcctggctaattttttgtatttttagtagagacggggtttcaccgtgttagccaggatggtcttgatctcctgacctcgtcatccgcctgcctcagcctcccaaagtgctggggttacaggtgtaagccactgcgcccggctttctgtccaacctccctgtacagctttgatcttgttctggatctaggataggttttggggttgggagctgcgggtagtgaagggaggtggctgttgggggtgccagggattccaggggcagaacgggcatccctggctccctccgctccatttaaccctcctcactgcaggtgctgcgagagatgtgcaagcagggataccgggatggcctgcgctttctgcagcggaacggtgcgcggacccgggcgggagagggcggggtgggctcggctctgctaccccctgcgggccgcggccgcgctgatgaactgagaatcccttctctccccaaccccaggcctcctgaaccggcccaaccccttgctggcgttgccccccgcccgcccccacggcccagaggacaaggaccaggcagtggagagcgcccaagcggaggattactcgcagctgcccggagaagatcacatcctggagcacctgcccgcccggctcaatgagggtgcgcacctgggggacgggaggggaggaggggaggcaggagggaaagagagagaggagaggacggtgagcaggggagggaagccgagcgggtcctgggccccgctgcctccactggccgccgacctcccgcccacccgcagccctgctggaggcctgcgtggagcccacggacctgctgaccaccctctccaacatgctgcctgtgcgtctggccacggccatgatggtgccctacacgctgccgctggagagcgctctgtccttcaccatccggtgtgagggctggggggtcgggagaggggcccaggggacggactttgggatcatccgcgagtgatggttaccagggaaggtggggtggggtgagcagtgccaagtcagggcacagacagggcccggcgggtgggcatgtgggtctggccaagtccctgaacgcgccgctcgccctgtccccagcttgctggagtggctgcccgacgttcccgaggacatccggtggatgaaggagcagacgggcagcatctgccagtacctggtgatgcgcgccaagaggaagctgggcaggcacctgccctccaggtgagccgccgaccgcgcgtccacccggggcccgcggtgctagcgccgggagctgaagccctccctgccgcatccctgccccgcaggctgccggagcaggtggagctgcgccgcgtccagtcgctgccgtccgtgccgctgtcctgcgccgcctacagagaggcactgcccggctggatgcgcaacaacctctcgctgggggacgcgctggccaagtgggaggagtgccagcgccagctgctgctcggcctcttctgcaccaacgtggccttcccgcccgaagctctgcgcatgcgcgcacccgccgacccggctcccgcccccgcggacccagcatccccgcagcaccagctggccgggcctgcccccttgctgagcacccctgctcccgaggcccggcccgtgatcggggccctggggctgtgagaccccgaccctctcgaggaaccctgcctgagacgcctccattaccactgcgcagtgagatgaggggactcacagttgccaagaggggtctttgccgtgggccccctcgccagccactcaccagctgcatgcactgagaggggaggtttccacacccctcccctgggccgctgaggccccgcgcacctgtgccttaatcttccctcccctgtgctgcccgagcacctcccccgcccctttactcctgagaactttgcagctgcccttccctccccgtttttcatggcctgctgaaatatgtgtgtgaagaattatttattttcgccaaagcacatgtaataaatgctgcagcccagcctctgcccactttgtgtgtatgtgaccgcctgcttacttgcagtgagagcctggtggccagggtctggccctaccttggctgaccagcctctccacagctgcaggccaggtctcccagcgtcgcactcctgggcctggcatttggaacctgccaggctggcctgggaacacccccctacaggcacatatgaacgtactgcattcctgccgacccccctgtctaggatgcatccacaccccccccaattttgcccagcagcctcctggctgacccttggccacagccttctgagggccaatggaaatatttgggaccaagattcttggtaaataaaaacgaaaatgtttgcaaaaggtgtcgcctgcccctcccctcacacggtgacacagtggggtgtgtgactgttttggggcttggccagctgtgggggctgaggttcctgaaaccaagcacaggggacctgggaaagctgggcccctgctccacttgggcgtttggcccaaagttctctgtccccccaccctcacaagcctctctggcctggtgcacataccttcttgttcccctgcccagcctcctgccagtacacagggcagggctgggatatggaggcaggtgaggtcctagctgaaggggactcagccctgtgctggggaagtggtttcctgagggcatcctcttcatggcagggaggccatgaggggagaaggccagccctccttggcaaccaaaaaggccccatggcctgagggtgctggagccagcccccacctgctcctcccagaaggcgtggggtggctgtggtggcagccccctgccaacaataacggttggttctgggatctgggactgggcgagccggccaggcaggtccctgatgtgcctgtgccagaggccaccccccttggtctcaaggtcctgtcctataagcccagccttttgtggttcagctg

SEQ ID NO: 838 - DNA, 45643 bp, Homo sapiens
  source 1..45643: mol_type = genomic DNA
cggccacaatcattaatcttaaaacaaatttaggagagccagggcagaggtaagggatatcaaaggagggcagagattcttccttcttggtcctcaaccatcctgaagatggaattccctcgaggctgccacctggagtcccatggaagaaacggggaacggaaggttaatctcacacaggaaggccctggacaagttggggtaattctcaccatgttgtccttgccagaggagcacggaaagtcctggaaggtgaactttctcactcagggtttggggaatcccaaaggctccagaactttggaatcaaacaaatctgggcattaatttcaactctctcacttcttggcaatgtggcttcaacaaatttcttgacctctctgagcctctgttttctcccatttctctgtgaaatggggctcataatatccacttattgggttattgtgagggtcaaggagcccacctttgaaaggtactctagatgccccataagtgggagctccttctttccaacaagagcatggggaggcgaggccattgatcaactctgccagtgatgcccaaggggagtgtttcccgaagacctgaagggctctttcctcacccagacagagctctgccagcaatcagacgtaggaccacgggaggtggtgagcaaggcaggctgggcaggtttccacggtgctaggtcaagcaggcagtctttaggggcagcgactggcctgttgccctctgggggcactctctccccactaggcccatgtccatcccacagaccaaggaggaggtaggaaagtgcaagacagggggaagctggctggagaaccaagcaatggagaaagggcaagggaggaggctggaggggaagcgagggcccaggcaggcacggggtggggctgggagaggggcccagggcaggagggcgggagaaagcctgggagggaaagcgccgaccagggagggaggagggacagggagggaggcctgcggcgctgacacagcctcgatgtgtggaactggctggggtttggcccacaggtcaggcgtctggcagtattatgggatggagaggccttaggagacagggagagtattatgggctggaacagccttaggagactggggaatattatgggttggtgaggcccggctccaactggaggcgggaggaaggggtgcggggcgggaagggggggtggtggtggaagggagtattatgggctggaggcctcctgcgaccagaggcaagagtattatgggctggcaaggccttcggtggccagaggggggagcagcgggggatggcaccggctgcatgtgactgagggggggccaagttggggggggtggtgagtgggggtgggggagcttattatgggatagctctttgtacctactgcggggactgcttctccagaagatattatgggatgtcgtgtgtgggagggggagtggggctggggggattattatgggatggtggtgcagaatggggagggcctgaggagctcttctccagcccccccacctcctcaacccttactcgcctaccatcctttctaaggtcaccgtcctctctcagactccccaagaggaacacctgaaacccatctccctacacacacagactttgggcacctcaacccatcccgggcttctcccctaactagcagccacctccggggtgctgaggagaaaagtagcccctggcgaatggggagaaagccctaaagcagggtggtggtggccagtggatcacaccttccacctgcacgacggcctcctctgcaccctagccccttataccaccgtccttccccttctccctgcatcccacaaagtgggggccctggatctttctcccctcccccctcccctccatttcctctccagctccctccacagccgtaaccagtaaaacaggcggccagctattatgggatggctgctcccagcagctctgcagggagggggcggtcaccgcggaatgtctcttgtgggtggctattatgggatggccgcctctctttttttgggggggtaaggctagcgaggaggattattatgggatgtgccctgcacagctgggtggggctgtccaggagaggtgaaactctagggaggggtggggagggggagggaaggaagagggagggaaggagctggggagggtagggtgagccctggagtcggacctgaggcctggcaggagtaactggctggagaggtttctttggtgacagctgtttgaaggggcccctggggcaggctccagcgagccaaatctgaaccctggacacctgggtcctttaaacagcttgtgcgctacagggttgccctgtgagtccggggcctgcagagctgcactgcaaatgagaactgagatgttctggccgggtggcataccaaagggagtagtagtcatggatggcgatagtacccgtctcccttccatctttgtcttcctgggtttgagcctggggaccatagctcaggttgggggattgtgcacggagcactttgcttaggttggggggttgtgcacggagcactttgcttaggttggggggttgtgcacggagcgctttgctaccttgcagtcacacccaaaaaacagatagtaggttgcctcctgagatacaaacacctggcatgtcacccccaagccccacgtgatctgcatcctgtctagcctttggagtgcactgtcactgtggctttgcttccctcgttgtctcccaaaatccccttttcagacagagcaggagaacactgtggccccttggacctcttatgaacagagtttttcaggttcacacaaaacagaggtgtaaggagaggaattatagagcaaatgctaaaaactccatgaacaacccactctgagtgttgttctaggttcttctgtaccatgggatgaaaacagaactctaaggtaactggctagagaggctgccctcctgggtgcattaattaggagattatgccacccttagtctccctgggccagtcatgctagtggtttatttataatttatctgggagggtagcacggggctagaggagggaggggaagcgtagaagcataaggactacaaagcaacacaccagcacacacctccgagccctttctggaactcaagaagagaggaagggattttaactttctccttgttgtggtgttagggagaggtggggagcaagagcagcaaaggaagaagtgggtagaacctacaggaatagggacacagggtgagtagtggacaaaggatatatggataaataaaatgtggatatttttagtcacaggcaggaggctgtgactacccaaacgctctcttactggtttatatggacagatcactgtggaaatgagagtatgggtatgggcagatggagatattgcagaagggaatttgaggcccagagacaggctggatcccctggagaaatgagggtagaagagcgcacaataggcatctggcagccctctgtaggaaggagaaacttccctgaaaggaggtgtccccacatcatggtatctgaaaagagctgcctcctcaccccccattgtggaacacaagtttcattcttagtactcagagtaagtatgggagagggcttgggtaagtaaatggggcccagtcttgatgtcgagagcatttaacgagggaaactggaagccttgcagaacgggggagaatggcccgcttgccacaatgagtgcagcaagagggtgggccagggagctgaagggaaggttggaaaaagaaaacacctacttcaaaggtgacagggagcttttgacaggacctgatgtctttgatgccaaaaactccagtcctaagatgaggagagttaaatgtggaatgctagtgggtctacagagtcagccaggagctagcggaagacttgtctgcatccctggtgctctgctcaggagcagggggattgtaattccctgaggcaagctcttgccttccctgaactcatttctttgtaccagttctccagtcccttggatcctagagaaggggagagccatctggccaggccttcctctaggaaaatgagatgagaagggtaatgcagagatggcatgaggttcatcccactcactactggttagtaaagggccctttctacaaggaagtccaagtttcttttcaactcgtcccacttccataggtcttggacccatgcaaaaaaggtacatgagcagagggagacattatccttggcctggggttagggcagcaaggcagtggtgctgggacattggttttcactcaggtcctgaatctctgggagtcaggaaaagggaaaagtgacaggctgatgggttaggttttctgagggccaaagggttttaagattgggctctttcctggccaggcgcagtggctcacgcctgtaatcccagcactttgggaggccgaggcgggcggatcacctgagtttgggcgttcgagaccagcctgaccaatatggagaaaccccgtctctactaaaaatacaaaattagccgggcatggtggcacatgcctgtaatcccagctacccgggaggctgaggcaggaaaatcacttgaacctgggaggctgaggttgcagtgagccgagatcgcgccatggcactccagcctgggcaacaagagcgaaactccgtctcaaaaaaaaaaaaaaaaaaaaaaattaggctctttcctgaggtgggaagatcacttgagtccagaagttcaagatcagcctggcaacatagtgaaaccccgtctctacaataaatttaaaaattagctgggtgtggtggtgtatgcccgtggttccagctacaggtgggaggctgaggtgggatgatcacttgagcccaggaggttgaggttgcagtgagctgtgattgcgccactgagaccctgtctctcaaaaaaacaaaaaacaaaacaaaaaaaattcggttatttcagcttctaggattgggtccatagggtggctggagggtatgcataataagggaaggagatggtatacgctggagggctaccttggggcataattcaatgtagaaggtttcctggactgctgacttctttttttttttttttttttctgaggcagagtcttgctctgttgcccaggctgtagtgcagtggtgcaatctcagctccctgcaacctctacctcctgggttcaagcaattctcctgcctcagcccttgagtagctaggattacaggcacgtgccaccatgtcaggctaatttttgtatgtttagtagagacggggtttcaccattttggccaggctggtcttgaactcctgaccttgtgatccacctgccttggcctcccaaagtgctgggattacaggcatgagccaccatgccccgctggaatattgacttctatacaggcaggggaagatggggaacattatacaactaaagatttttttttttttgaggtggagaatgtggccccaacaagatgaggatggaggccattggagatactatgagacttcaggatataaaatgggaaagtgcctgaaaaatatgggacattgaggataagcaggatttggtgttcaagaatgagggaaacaatgctggtatattgtggagtctcttaagaaggaaggacatgaacatattataggatttcagtattaggaatgctggatggatgaacattgctttccaagaaaaatcccctagtaagtagggaacagataggagatcatgttgactatggtctatacccataaatcctttaagtatcatcttccagcctctagaaggaccacgataaatcttattgggatatgttctctcttggaaccagtgggattttattttctgtaacaggaaattgggaaacagtgctcagcagttctcccttggcaccattctgtcgtgtatcatagtttgcttggttgcttatgctttttgaagggaggccccctggtcttccttgattctccatggtgcggagctcggccttgctaggtactctgtcaacacaggttgaatgaacatgagtagtggtgagtagcgggagggcaggccttcactcttggtgtgtatagagcaggaacctgagttcacatcgtgatgggatgtccatccccaggaatggcctgggggtgttggtgaaagatccctgacctggggatgtggtgagggggaggattgctagaatgttgagagatagtctttggatgggagttggtaattattatgggatgctgtagggtgaattagacttcatgtaaatgtttcatctgtcagcttggtattttggttggttggtgttcctcaaaacttaggagctggaggtaagcatctggaaaatacctagattttggtgggactgggtggggccctaggtgggctcccagcccccgagtgtctggaaatgatggtatgagggaagctggggtcccagacatcaggaggctttttgccaggatactactttggcccagaaagggattaaggtgtgtgcaagtgggggcggggacaaggaagcgtgggtagcctgcctggccctccctgctctgggtgttagaatagactgacagcgcctggagatgggggtgggaagaatatgaatattatgggatgcctggctcgaagggtataggggtggtagagtggagatgaagcattatgggatgtgacactgggttgtgttgggagtattatggtatgtttggttgaccacgggctccttgcaattattatgggatgtcaggatgtgggtaggagagtaaaattattatgggatagctttccagtgttagaggaaaagagattagatgtccatctgtggggcgacagtagggctgttgatcattatgggttatctttttgatagaggaggggtacttactataggctgtggagctagaagagggaaggctgggggtgatgtgagcctctagaccctggcctgcagggactgagggcagctctagggggttagttattatgggatgtcagtatagaaagtgggagactgattattacgggatgtgtgtgggaggaggccgagtgtccgttgttgtagtatgggggggggtgagtttctgactattatgggatatcaaactgggggtggatgaaggatggttattatgggatgtctgtgggggatggggctgaatattatgggatatgaggcataagtgctgcgaggggtgcttattatgggatggccatggggagggaggggtgatgaattattatgggatgttagcattaggtccaagagtgaagaagaagttggcaaaggatgtctattatgggatgtctaagagggttagttgcaaaaggtctgcaatattttgagatgtcagcagtctctggcatatgtgtatgaaatgtgggggggcagggtgtgtgtgtgttgtgtgtgtgtgtgtgtgtgtgtgtgtgtgtgtgtgtgtgtgtgttgggggggggggtgtccgtgtgtattatgggatggccaggaggtgggcggttgcccaggtgacgcgcgcgcgcccgctgcgaagggggcgtggccagtggttgcctgagcgacgagggggcgggggttgcccgggagacctggggaggagggtggcggtagtggaaggggggggttggagttggttgaggttattatgggctgtccgtgggggggcggggcctgtgcggtgggatttcccggccggtgtttcaggccctttaagaggcgacgctggagccggagccattttccccccttcggccgcggcgaggaggagccggagcgggagtgacaccgagccggacccagcgcgacctgcggcggctccggggtgaggagagcgcggggttcccaaagagacgcccctcacggccctaccagccccgagggtcatcccgtcacccgccccttcctcaggcgtctccggacccgcggaccgccccttgcccagaggagccgacccttcctttcctggccctgcagggcgcccggcctcctccccagcccccgccctaaccctgccggagtcttgctccccgcgaccccccgcctccggcttggtctcccacaatgcccggcgcccaccccctcgccctttgatcacttgccccccgggacacgtggcccggcccccttcccggtgggacgctttcgccccccgcgtccctgcctccggccccccgcagcgcccgagcctccacgccccctcgtccccgcagctcttgaggagaacctgagttgtcccagaggacagcctttggagagctgccctgtctggggactggcccctccccgggcgcagggaggcgcccccccacccccaagtgaccttgtgtccccgagcgcctcgccgcctgcggcctcccctggcccccccgcgccgctgccactcggaccccctcccccgtcacaccccgctcggtccagccccgcgtctcccctccccgcgcttgcaccagcctgccctcggaggcgtcgctccctcgctccgtgggggcgcctgccggggagccggcttccgggctgcccccgaggagtgtggaactaagttcagcctgagcggttcgggtgccctgctagggtggctggggtggggggcggaaagagcgggtgggtgtgggggagggggacagtgcgcgtcactgactgttctgtgtttctcccccctcccccgcacagtgactcgggccagtgtagaggtcctcaggccgccggcaggagcagctgggccaattccctggccgggagcggaaggggatggcgtcgggcctgggctccccgtccccctgctcggcgggcagtgaggaggaggatatggatgcacttttgaacaacagcctgcccccaccccacccaggtaacatcttccccaagggcccatggcgggaaggagacatctggggctctcccgagtgactcctctggtgaggcagggctgtgttgctccgctgtctctgtgcagagccggaggtggagggtatccgaagggagtggttcccttctgcggagctctggtgtgaggggggtggaagccatgtgcctcctgggcacggagatgccagcttgctgcactctgtcttgaggaatgctctgcagttcccagttgagggagctctctgggctggcaggcattacctggtatgtgggtcctcggaggaatgcaggtagctgggacccctggaggcttgtggtggtggtggtggaggggggcgttgaggattctgtttgaaagaccagccgggcatctgtgctagtaggatcctgtggttgctgctgtggaaaggaaagagggagtgctggttacactctatctgattatttttagcttctgatcggttaccggttttctgtgctgtctgaactgtgtgaagtttgaatcgcgctcctcagcaggatctggagtgcttaaagcagccaggcagattgctggaatgttttgagtggggaagtgatgggggctcggggaggatgtaatagcctagtgaagaggggcaaaagaagggagggcactcctcctcctggtgagtggacatagttttggcttttttcctagtggcttctgtctctatgaggtagcctgcggtttaggctggcagtgtgaagtgtctgtgtaggtgtgctaggggttacgctatctgtgttttggggtggcttcatgaactggccaaacccgtatggttgtaaccaccctgtctgattgggggaactgttgtctatcctcaaatgatggttgatgtcatgcccctaagcagatgtctttctcttctgtgtcctttttcagagcccctagctgtgtcacctactcatctccttgaccttcatgttttctagtttaatttttttttctacatgtcatttcttcattccttctgcttctagttttcttctcattctggagcctgctgatcctgtttttgtttctcatccagcatcattcacttctgccttctctcttcttagcttcagtggaagttgaggtggtctgggagagatgctttcacatttggcactttttaagttggaattcttcacttcaacctgaggccatttaggagaggggttagtgttgtcatggagtctgggctgttgggatgagaaacttggtttcatccttgtgtagagtagggggcagatttccatgcccttgcccaaggtgagggcggagttgtggtgctggtaaggggaccctgtccttctgagaggggcatgagaaacagtagtgctgcctaaacattctgggttccacgtcttggcctcccattggccacttgggctggggctgcctttcatgttgaccgggagctgcgcaggagctgtgaactctgtcctgagctgtagcatgacccactttttccacttgccacaccccattcctgtccctttcctaaatcttctctatatctcagtaagtttgcggtttgccatttcagcatattatttgcctgagaagtttggggggctccatgtgcatggaaggatgtcccctttgcctccatgggttgtctttgtctccacttccagcttttatgggggtggtgagatgtagctgatgggggttgggggttgacttggggattggtggggaaaagtccttaagaaaatgattctttctggtgaaatccaggctgatgttgcattcccaagggggaatgggaggggcgttcttgtgcctggtcttattctgggctgagaagcagggaggctgatggtgctttgtccagcctaatgtctcattccctagtatctgtctagctcaggaagtggggagccagagacattttagggctaattttgggggttaagagctaagaacatgtcagggattgaaggagggatattattttcttttttatttttgagatggggtctcactctgtcgccaaggttggagtgcagtgtgcgatcttggctcactgcaacctccgcctcccgggctcaagcgattctcctgcctcagcctcctgagtagctgggattacaggcacccaccaccatgcctggctaatttttgtttttttagtagagacagggtttcaccatgttggccaagctggtttcgaactgacctcaaatgatctgcccgcctcagcctcccagagtgctgcgattacaggcatgagccattgcacccgattgggatattctcttctaccactgtctaggtcctgctctgtttttttgtgcagacattcccatatgttggataggaatctgggtgggagtggtgaggaagctgagcttcagagacttcttgtgggcctccattcctcaaactaaatcttttgggtatcagaaatttggggagaaggttgtatgcgctgaccacaagtccactgagcctttgttaaatctcagctctgatgattgaaaaaataattatgattgagggagtgatcgagttcttctcttagtattaccttcatgtttgtctcgctttccttgggtttccttgcttaggatgttagggtgggctcttgtgaactgttgtcatcccagagtaggtggcatttggacctggggccaggtaatttggggaggcttctatgagggcagtctccccccccgccaccccacctctctcaaacccaccccctcccctgccacttcctgtctgtcctatgttggcagctgggtgccctgggctggcttctgcggtcaggagccattttccctctcctcagtgggtgaggcactcccttcttctctccactcctttctctacccacccccctttgggcgggggtggcttgggaagagggagagaggagggaggagggagtcggagccagtgtgaatgtctgttacaaaggaagctgcctcctggtcttctctgtgtcccttcccacctatccttgcccaggagctttcagtcttacccaggctttgtgtgtgcctccagccaggggaggaggtggagccagatgggaggaggcttgctggggggcgggtgtaggggagatggtgacagctgggctgattcgggcccctagggagaagaggctgctgacccaggagaagctgaggaggaacattagggttggagatggggaaaggaaattgtattttagaagtgggcatgagattgagctggcacctgaacctaggacttggaggttctggttaatttgagcagtgatgacttcaaagtggttagagaagggtgtggtttccgagacccctgaactgatcctgttctgggaaggtatattctatagtttttgccttctgagtaggatctttcattctcattccctggtttatagaataacttggtggccagttacaggaggcctaaatctagttctcttacttggtgaactctgagcagctcagttcagctgtactggtgaacatctagaggactggtaggaacgggagagaggaggcaggggtctggacagctgcccgaggtgggcctggtctggcctggcaggcctatttcgggtatatacagctctctctttgtctgtttttgtcctgggtatcagcttcctcctgtacagagtatagcagttctcttcagaggaatctgggacaagaggtggggaataaagtctaaagcctctggattagggcctaaccttttgctattgatcttttccctgcctaccactctttgccaaatatatgtagaaaatgaagaggacccagaagaggatttgtcagaaacagagactccaaagctcaagaagaagaaaaagcctaagaaacctcgggaccctaaaatccctaagagcaagcgccaaaaaaaggaggtgagtgggtgactgaatgttacggggaatcagaggaagaagggaggagctctgagaagggttgaagggctgagggcatttgtttctttctcagaagtggtgggccatgttctggggatgagcctcagggctgtcctgaggtcagcatgtgtgtagcatgtgtgtgtctgtctccctcttccccccttgccctgctccagcgtatgctcttatgccggcagctgggggacagctctggggaggggccagagtttgtggaggaggaggaagaggtggctctgcgctcagacagtgagggcagcgactatactcctggcaagaagaagaagaagaagcttggacctaagaaagagaagaagagcaaatccaagcggaaggaggaggaggaggaggaggatgatgatgatgattcaaaggtgcctggacctccatcctcttctttgtactgttaaacttttgtctttttgtttcctagacaccttactgccctttagaacactttctcttcttttcctcttaactctgttactctgatttttccacacaaatttgcttagcaagtgtgggcactaggtggcaggtacttacttgactttgctctttctgcaggagcctaaatcatctgctcagctcctggaagactggggcatggaagacattgaccacgtgttctcagaggaggattatcgaaccctcaccaactacaaggccttcagccagtttgtcaggtaaaacagaaggggtttggggaagggggaggagaatctttctgttctctcttcttacttctctttctttttttattcttaaacctttccctctgctcttgtgcatttctccaccagacccctcattgctgccaaaaatcccaagattgctgtctccaagatgatgatggttttgggtgcaaaatggcgggagttcagtaccaataaccccttcaaaggcagttctggggcatcagtggcagctgcggcagcagcagcggtagctgtggtggagagcatggtgacagccactgaggttgcaccaccacctccccctgtggaggtgcctatccgcaaggccaagaccaaggagggcaaaggtgaaatggggttcaaatgggagtgggggtgtctagtgtgggcttaagatgtcaaagacagcatgggaatgctggtctgtcagccctaaggtaggagataggagggaggaatgagtcttggattttggagggaaatttgggaatctgaatgtggggaagcaagcttaggtggagaagattttattttccccatctttggtcttgtggtatatatttggatatatcctgattttaggtcccaatgctcggaggaagcccaagggcagccctcgtgtacctgatgccaagaagcctaaacccaagaaagtagctcccctgaaaatcaagctgggaggttttggttccaagcgtaagagatcctcggtgagagcccagcccatcgctttagggagggtgccatgtctaatagaaaggatgtgaccttctatcagaacctgtccttcatagtaggcacgtaagaatgtggggcgtttcccacagaacaagatgagactaggctccctgtataacggtgcttgctgggattctggtgtccccagtgagagagtactcccctctctgccactctgtccttccccttggcttgaacgtctaaccttattctttttcatcctgccagagtgaggatgatgacttagatgtggaatctgacttcgatgatgccagtatcaatagctattctgtttctgatggttccaccagccgtagtagccgcagccgcaagaaactccgaaccactaaaaagaaaaagaaaggtgtgtttctcttctgtatatttgtgatgggatgaggtgggagtgattggggaagaatctccctaaggagataggggtcggggggtggggggaggtagtttttttccaataactgggctttccctcttccttgcccaggcgaggaggaggtgactgctgtggatggttatgagacagaccaccaggactattgcgaggtgtgccagcaaggcggtgagatcatcctgtgtgatacctgtccccgtgcttaccacatggtctgcctggatcccgacatggagaaggctcccgagggcaagtggagctgcccacactgcgtgagtgtctggccattgtggccccttggaacccatgagaagaagggtgggacagtaaagctcttcggggcctggatggaaatggaaatgctggtgctgcgggttgtgagctttgggaagcattcaaaggaatgatgggcactggcttcagactgcggtgggcgggtgggggtaataatctgaatctgtggtcctttactgcaggagaaggaaggcatccagtgggaagctaaagaggacaattcggagggtgaggagatcctggaagaggttgggggagacctcgaagaggaggatgaccaccatatggaattctgtcgggtctgcaaggatggtggggaactgctctgctgtgatacctgtccttcttcctaccacatccactgcctgaatcccccacttccagagatccccaacggtgaatggctctgtccccgttgtacggtgagtgactgatctcagccggggcaaaaaatgggaaagtgtagtcttttctatgtaggctattgtgaggctggggtgcaggagaggaactatgagcttttcagccctgagaaaggtattctccttcatcctatagtgttgggatacttttgtcctgggaaaatataggactaacttcaaactgaggagttgatgttttgccagctctcttaagaggagatgaagcaatgttcttctagctgagaacatttgtccctgtgttgacaccctgcctcagggtcttggtagcttacaatgttttcaatttttttgttaaaaaaatttttttttttggagacagggtctcattctgtcatccgggctagagtgcagtggtgcagtcatagctcattgcagcctccaactcttgggctcaagtgatcctcctatctcaacctcttgctgagtagctaggagtactggtgcatgccaccacatccagctaattaaaaaaaaaaaatctctgttgagacagggtctcactatgttgcccaggctggtcttgaattcctggtctgaaaccattctgctcccttgtcctcattaagtgctggcattacaggtgtttaccaccatgccagccagtttagaatgtttaatagggccacttactgctttagattgcttaagggaggaattctgtgctctaagtctgttgatttcctgattgttctggcttattgttaaagtctaactactggctctgttaagcagataggagtgatggtggcacgcaaatcctggacgatgtccagaaatggagagggaattctattacaggttgagcaccctaatccaaaaatgtgaaatccaaaatacttctggtcccaagcatttcacatgaggggtcctcaacctgtattttctccctggaggagtcctgggattagattttatttgaaatgagatctttttttatttttttgagatggagtcttgctctgtcccccaggctggagtgcagtggggcaatcttggctcactgcaagctctgcctcccaggttcaagtgattctcctgcctcagactcccaagtagctgggactacaggcgcatgccaccacgcccagctaatttttgtatttttagtagagacggggtttcaccatgttagctaggatggtctcgatctcttgacctcgtgatctgcccgcctcggcctcccaaggtgctgggatttcaggcatgagccactgctccaggtctgaaatgagatctgaatcgtcctttgatgaagttgagactgtgggctgtcccttctcctcccatggttatgatttgagattaagttgtctctttttctctcagtgtccagctctgaagggcaaagtgcagaagatcctaatctggaagtggggtcagccaccatctcccacaccagtgcctcggcctccagatgctgatcccaacacgccctccccaaagcccttggaggggcggccagagcggcagttctttgtgaaatggcaaggcatgtcttactggcactgctcctgggtttctgaactgcaggtaagtttaggatagtctggagatgtaggggctacgatgaagaggatagtgacaaaagagccttgtggatagaaggaatgaacacagcttcttggtggctgattttctctttccgctcaaagctggagctgcactgtcaggtgatgttccgaaactatcagcggaagaatgatatggatgagccaccttctggggactttggtggtgatgaagagaaaagccgaaagcgaaagaacaaggaccctaaatttgcagagatggaggaacgcttctatcgctatgggataaaacccgagtggatgatgatccaccgaatcctcaaccacaggtaccagctgagcacacgggagacgggcagtctccgtgggagagtcctgctaaagagattgggaaaatggctgtcaccagtaacttagacttggaagacactggttttttttgtttgttttttgtttttgagacagagtctcactctgtgcccaggctggagtgcagtggcgtgatctcggctcactgcaacctctgcctcccagattcaagtgattatcctgcctcagcctcctgagaagctgggactacaggcgcaagccaccatgcccagctaattttttgtatttttagtagagacagggttttcattctgctggccaggctggtcttgaactcctgacctcaggtgatctgcctgccttggcctccctaagtgctaggattaacaggcgtgagccaccacgctcagccttatatatttattttgagacaaattttagctgtgttgcccaggcttgagtgcagtgtcgtgatcactgctcatagctgtcccaaactcctgggctcaagcaatctgtctgcttcagcttcccaaagtgttaggattacaggcgtgagctactgcgcctgacacttcatgttattatctttatttatttattttattattattgtttttttttgagacagacttgtcacccaggctggagtgcagtggcgtgatcttggctcactgcaagctctgcctcctgggttcacgccattttcctgcctcagcctcccgagtagctgggactacaggccatcgccaccatgcctggctaatttttttttttttgtatttttagtagagacgggatttcactgtgttagccaggatggtcttgatcgcctgaccttgtgatccgctcacctcctccttccaaagtgctgggattacaggcgtgagccgccgcactcggcctatttatttatttatttattatattttttgagacagagtcttgctctgtggcccagcctggagtgcagtggtatgatctaagctcactgcaacctccgcctctcaggctcaagtgattctctgcctcagcctccagagtagctgggattacaggcgtgtgccaccacgcctgcctaatttttttttttgaaatggagtctcgttctgtcgcccaggctggagtgcagtggcgcaatctcagcttgctgcaacctccgccgcccgggttcaagcaattctcctgcttcagcttcccgagtagctgggattacaggcacctgccaccatgcccggctaatttttgcatttttagtagagacggggtttctccatgctggccagactggtcttgaactcccgacctcaggtgatccgcctgccttggcctcccaaagtgctgggattataggcgtgagccaccgcgcccggcctgatgcctggctaatttttttttttttttttagtagagacgggtttcgccatgttggcctggctggtcttgagctcctggcctcaagcgatctgcctgcctcagcttcccaaagtgctgggattacaggcgtgagccactgcacccggccaacactctatgttaattattaactgactgaattctggtgtttgagctctaggaaagtataaattagagataatttttggtcagagactggtacagtagaggctctgaaaacgtgtgatctgtggcatacctagaggtctggtgtgaaacaaacggtattgccagtttttgagaggaagtgaggagggttgccttttctggctctgagggttttctctcctggacttgcagtgtggacaagaagggccacgtccactacttgatcaagtggcgggacttaccttacgatcaggcttcttgggagagtgaggatgtggagatccaggattacgacctgttcaagcagagctattggaatcacaggtgagtgattttgggtgaggcatagagttgtttctttttttttttttttgagatggagtcttgctctgtcaccaagctgtagtgcagtggcgtgatcttgactcactgcaacctccgacttcctggttcaaacgattctcctgccttagcctcctgagtagctgggattatttgcatacgccaccacacctagctgattttttttttttttttttttgagacgaagtcttgctcttgtcccccaggctggagtgcaatggtgcgatcttggctcgctgcagcctccgcctcctgggttcaagcaattctcctgcctcagtctcccgagtagctgagattacaggcgtctgccaccatgcccagctaatttttgtatttttagtagagacggggtttcaccatgttgaccaggctggtctcgatctcctgacctcaggtgatccgcccgtctcagcctcccaaagtgctggcctcccaaaatgctgggattacaggtgtgagccactgtgcctggccaagttgtttcttctatagaaaaggattttgggcagctgtgtgatgtctttcttctttagggagttaatgaggggtgaggaaggccgaccaggcaagaagctcaagaaggtgaagcttcggaagttggagaggcctccagaaacgccaacagttgatgtgagtgggggtggaagggactgtagtttgttgggtaggacaatgtatctttgctgcagtctaatgatggtactcttaagtaatgaaatgcagatagtaactttgtagctgagattacttcacaaagtcggcttccccacttctccacatctctatatatcagaaagcactaggattactttcttcttttgtcatcagaaaaaaaaaaaggaggtatattttgaatgattgaagaagtgttgtctggggggaggggccacatagcctagcttttatgcacttacataggaatctggcttaattcaggctcagttcctctgggttttgtttgtacagtgtaatttgagggtgattaaagttaaaaagatgaatctaagagggacataacgattatttacctggtggatcctgactagtagaattattgtattggtagggagtctgtgacgtgcttttcctcagtgatctgtaggatcaaaatcaggtctggttaagccctgtttcctggaggaccctaaactgaacatgaaattgcagtaatcataggggatctcttccctccgaattttccggagctcttccccaagaggatccgtgaagactagtgaggaggaagcagctgctctattaggggaggaggggagttccttgccagctcttgacttctctgtttcatccttcagccaacagtgaagtatgagcgacagccagagtacctggatgctacaggtggaaccctgcacccctatcaaatggagggcctgaattggttgcgcttctcctgggctcagggcactgacaccatcttggctgatgagatgggccttgggaaaactgtacagacagcagtcttcctgtattccctttacaaggaggtaaggaaatctggggtggatagttttttgtgtgggtgttttgtgtttgaagccttaacttacactgagtagagagataagggaataaaaaaattggtctctgaccttcaagaacactgtggataatagataaacacatgtacacatgtgtttagtagatagtagataaatgtgatagtggataaacacatgtacacagcggaagatttgagggcatggagccctgggtaggattagcagtggatccatagagtatcagttctaggggaatgattgtgtgttgagggaagtagaattatgagtagaattagtatggaaaggcttggctggacgcagtggctcatacctgtaatcccagcactttggaagcccgaggttggtggatcacctgaggtcaggagttcgagaccagcctgaccaacatggcgaaaccccgtctctactaaaaatacaaaattagccggatgtggtggtgcacgcctgtaatcccagctacttgggaggctgaggcaggagaatcgcttgaacccgggaggtggaggttgcagtgagctgagattgcgccattgcactccagcctgggcaacaagagtgaaactccgtctcagaaaaaaagtatataaagacttaatgggagaggtaagacttgtagttatggtgggaccttgggtttttggaaaggagtgggctgggcacttgtatagaggaaggtgagagcaggagcagcagcgcaggtgtgtcagtccttggctcagcttgagggggcagcagggtggtgggtgttcgctggggttgcagtgtgctggggccctcagtcctgactctcctcttttttctcaaagggtcattccaaaggccccttcctagtgagcgcccctctttctaccatcatcaactgggagcgggagtttgaaatgtgggctccagacatgtatgtcgtaacctatgtgggtgacaaggacagccgtgccatcatccgagagaatgagttctcctttgaagacaatgccattcgtggtggcaagaaggcctcccgcatgaaggtatctcaggggagggaagccaccctagagaaagagttgtggcttctggcttagtttacctccttgtgatctggtccctggtgaggcaaaagggtaaccctgggaggaggaaaacattccatcagtctcctggttgtgcttacacagaggaactgactagtagtgaccaagttgccttcatgtgcagaaagaggcatctgtgaaattccatgtgctgctgacatcctatgaattgatcaccattgacatggctattttgggctctattgattgggcctgcctcatcgtggatgaagcccatcggctgaagaacaatcagtctaaggtgagggctgagggagggatgttggagcccccactttgggttttttctagtactaccaattcattaaggggaaaacttgtagatggagaggagaggggaaaattgtctctgccttccttccttgtatgtgacagcccttggtggccaggcctttaaaaagaatgtgaggagtgggatgcttaactattgggcagtgaaaaacttgaaattttgtagagatttgctagagctctgttttcattggatttcacctttctccatctgcttcaccagttcttccgggtattgaatggttactcactccagcacaagctgttgctgactgggacaccattacaaaacaatctggaagagttgtttcatctgctcaactttctcacccccgagaggttccagtaagtatgtgtttatctgtaatcggctcataattgtgcctctcattcttcctgttgcccatttcctgtatcacttttctttcttcctttctccttctccaataacttttttcctttttctttctgaagcaatttggaaggttttttggaggagtttgctgacattgccaaggaggaccagataaaaaaactgcatgacatgctggggccgcacatgttgcggcggctcaaagccgatgtgttcaagaacatgccctccaagacagaactaattgtgcgtgtggagctgagccctatgcagaagtgagttgggagggacagaagcagactccatttagacatctgccagtctgcagagtgtttcctattcctcccccactcagcttcaaggcatctggtgacaggagcaagcaaggcctgaagaaacctgatgctagggcgctggagcgcatagttcttacttattttaggttatacctttccttatttaaaatggtggtggtggtagtgcttgtgcgttaggtgtccttagttccaaagtgggatgtgttggaagaaagatctcagttgttggcactgcattattagtcattgaaaggctctcaagtctaacctgtctttctaccttgcccatgtaggaaatactacaagtacatcctcactcgaaattttgaagcactcaatgcccgaggtggtggcaaccaggtgtctctgctgaatgtggtgatggatcttaagaagtgctgcaaccatccatacctcttccctgtggctgcaatggtatgtagtgccatctcctgttcctccctgggttgggtcttctccatgtgggctttcttttaatacttttttctttgcatttgttctcaggaagctcctaagatgcctaatggcatgtatgatggcagtgccctaatcagagcatctgggaaattattgctgctgcagaaaatgctcaagaaccttaaggagggtgggcatcgtgtactcatcttttcccaggtatcatgtggactgggagctttagggaacagtcatagacaacccttagtgacctaaggaaagggattaccatctgactcttccataattaaaccgtgcttcttttgcagatgaccaagatgctagacctgctagaggatttcttggaacatgaaggttataaatacgaacgcatcgatggtggaatcactgggaacatgcggcaagaggccattgaccgcttcaatggtgagagagaaggagttgtttagtttcaggaatcctcatttgcttatatctttggactgtaacttcttgtgcatctccttttctgtgtagttcttttgggactttgtcatttgagatggagtaaagcttttgaatgtctcaattggacgaatgtattggactattcctaggagattttttcttttggggtatttgttctttctgctagaaagaagaaagcattgtatctcgagggcaagcaaagggtcaggacttgttcaagctcaaatagcaagttactagcagacttgtctgcctcagtagacgctactaggtttttttttttttttttttttttttttttgagatggagtcttgctctgtcgcccaggctggagtgcagcggcacgatcttggctcactgcaacctccgcctcccgggttcaagcagttctcctgcctcagcctcccaagtagctgggacaacaggcgtgtgccaccacgcccagctaatttttgtatttttagtagagatgtggtttcaccatgttggccaagatggtctcgatctcctgacctcatgatccgcccacctcggcctcccaaagtgctgggattacaggcacgagccaccacgcccagcctgttttgttttgtttattcgagatagggtctcactctgttgccgaggctggagagcagtggcacaatcatggcttactacagcctggacacacccccaggctcaagtgatcctgctgcttcagcctcccaactagctggggctgtaggcttgatccactgtacctagctaactaaaaaaatttttttgtagagatggggtcttgccatgttgcccaggctgatcacaaagttctgggctcaagcaatcctcctgccttggcctcccaaagtattgagattataggcataagccactgtgctcagtatcactactccttgtttaaaaaaaaaaaactttttattttaattttagacttagaaaaaagttgcaaaacagcagagagagttcatgtatactgttcaactagctagcttctcttaataataacttacgtaactgcagtacaatgatcaaaactagaaaattaacattggtattgtactataaatgacagaacttcaatgaatgtcaccaatttttcttgatgtctgttttctgtttcaggatccaatcccaggtcccgtgttccatttagttattgtgcttcctgctatctgtgacatttctttattttcttatatgatacagattttttttcttcttcgggatggagtctcactctgttgcccagattggagtgcagtggcgcgatcttgactcattgcaacctatgcctcctgggttcaagcaatactcctgtctcagcctcctgagtagctgagattacgggtgtgtgccaccacgggcccagatttttgtatttttagtagagacagggtttcaccatgttggccaggctggtctcgaactcctgacctcaggtgatccgcccgccttggcctcccaaagtgctgggattacaggtgtgagccactgtgcctggtcaatatagatacttttgataagcactgttcagttattttgtagaatgtctcttaagtttgggtttgtgtgatgttttctcttgattagattagacattctgggcaagaatgccacagaggtgatgatgtgtccttttcttttttttttttttgagacaaagtcttgctctgtcaccaggctggagtgcagtggcctgattttggctgactgcaacctctgcctcccgggttcaagccattctgctgcctcagcctcccgagtagctgggattacaggcacccgccaccacgcccggctaatttttgtactgttagtagagacagggtttcaccatgttggccaggatggtctcgatctcctgaccttgtgaaccacccgcctcagcttcccaaagtgctgggattacaggcgtgagccaccacgcccagtcgatgatgtgtccttttcagttcatcatactgggggacggacatgatgttcatatgtccccttactggtaatgacttgatcactggttaaggtggtgcctgctgagtttctgcagtgtaaagtttctattgttcccattgtgattgataaatagcttgagggagatatttgagactatgtcagtgtcctgtttctccttaaactttcacaccgatattagtattcgtcagtggaccttgattacaatgattattactgtggtgtttgcctaatgaggttttatattctgacattctttcttttttacttctgcctcccgggttcaagctattctcttgcctcagcctcccgagtagctgggattacaggtgcctgccaccacacctggctaattttgtatttttagtaggcagggtttcaccacgttggccagcttagtctcgaactcctgaccacaggtgatctgcccacctcagcctcgcaaagtgttggggttacaggtgtgagtcactgcacctggcctattctgacatttttctataagagttagggtcttgctctgttgcccaggctggagtgcagtagcacagtcagagctcattataaccttgaactcttgggctcaagtgattctcctgcctcagcttcctgagtagctgggactacaggcgtgtgccaccattcccagctaaatttttttttttttttgagatggagtttcttgctctgttgcccaggctaaagtgcagtggtgcaatctctgctcactgcaacctctgcctaccaggttcaagcggttctcctgcctcagtctcctgagtagctgggattacaggtgtataccaccacgcctggctaatttttgtatttttagtagagacagggtttcaccgtgttggccaggctggtctcgaactcctgatgtcaaatgatccacctgtctctgcctcccaaagtgctgagattacaggcatgagccactgcccccggcttaattttttaaactacatttatgaattggaatttaggagacacttctaatggtgtttttggttcttttattagcaccgggtgctcagcagttctgcttcttgctttccactcgagctgggggccttggaatcaatctggccactgctgacacagttattatctatgactctgactggaacccccataatgacattcaggtgagcagaggcagcaggcagccttaataagtaacatgttatgctagaaaggcatagtggcctctatgagggctccaccatctggaattaggtttttaagtgagaaacaacagattctttttgtgttgtttaccttattgtaagccagagtttggttagctgtgatcctattttgggtaacatgataatagagggtggtgtctggaggcaggggtgcaaaaggaagtttcctatgaatgtaggctgtggaccttgccttgtactgaatttagaatattatgtggaagtcaggataagagtggcaccaggaaaatacaatttctggctttatttcctgttcaactccaggcctttagcagagctcaccggattgggcaaaataaaaaggtaatgatctaccggtttgtgacccgtgcgtcagtggaggagcgcatcacgcaggtggcaaagaagaaaatgatgctgacgcatctagtggtgcggcctgggctgggctccaagactggatctatgtccaaacaggagcttgatgatatcctcaaatttggcactgaggaactattcaaggatgaagccactgatggaggtgaggtagtcaggaacttacgttttggtgtggggcttggcctctctaaaggttagggagaatctttgataccaagggtcttgtgggacttgctttttccactgcagctgctgaaactgactttggggatgtgggcccttgattttttataggaggagacaacaaagagggagaagatagcagtgttatccactacgatgataaggccattgaacggctgctagaccgtaaccaggatgagactgaagacacagaattgcagggcatgaatgaatatttgagctcattcaaagtggcccagtatgtggtacgggaagaagaaatgggggtgagtatgaatccaaggcaatcctgtgcttggtaattggtctgaaaattggcattgagaccaaggtggtatttgagacaagtggaaaatatctgtaggcaaattcttatgttgatgaattgatcctcttcctttgaaaacaaagctgataacatgactaatcagattttcatctttgccttggttgtcagaaaacttacaaccaaatatcatgctcacaacagttattttggctctttaccagaatgtcattttctcctatgtgttttattaaaccttacaaatgaaattttgaatgctacctcatctctctagagaaaaggcagaagatcctaggtaatctatctctttgtgttttctggtttttatttaagagacagggtctctaccaggtgcagtggctcacatctgtaatcccagcactttgggaggccgaggcaggcagatcacttgaggccaggagtttgagaccagcccggccaacacggtgaaaccccgtttctactaaaaataaaaaaattagccaggcacgatgaagcacacctgtagtcccaggtgttcgggaggctgaggcaggagaattgcttgaacccaggaggcggaggttgcaatgagctgagattgcgccactgcattccagcctgatgacagagccagactgtgtttgaaaaaaaaaaacaacaaaaaaagagacagggtcttgctctgtcacccaggctagagtgcagtggcacaatcatagctgagtgcaaccttaaactcttgggctgaagagtgaccctagtagatgtgtgctaccacacctggttaattttttaaatgtttttagagatgtcttgctatgttgcccaggatggtcttgaactcctggccttaagcagttctcctgccttgacctcccaaagtgctggaattacaggtgttagccaccacaccaggcctccttgtgtatgtatgtatgtatgtatttatttatttattttgagatggaatctcactctctcccccaggctggagtgcagtggtgcgatcttggctcactgcaagctctgcctcccgggttcatgccattcttctgcctcagcctcccgagtagctggggactacaggtgcctgcctccacacccagctaattttttttgtatttttagtagagatggggtttcactgtgttagccaggatggtctcgatctcctgaccttgtgatccacccacctctgcctcccaaagtgctgggattacaggcgtgagccactgcccctggccttatatattttttttttgatacggagtcttgctctgttgcccaggctggagttcagtggtgcgatcacagcctactgcaacctccacttcctgggttcaagcaattctcctgcctcagcctcccaagtagctgagattacaggtatgcaccaccatgcccggctaatttttttatagttttagtagaaacggggtttcaccatgttggccaggatactctagaactcctgacctcaagtgatccgcctgcctcggcctcccaaagtggtgggattacaggcatgagccattacgcctggcctctttgtgtgtgtgtttttttttttttgagacagagtcttgctttcccgcccaggctggagtgcagtggcatgatctcggctcactgcaacctccgcctcccgggttcaagcagttctcttgcctcagcctcccgaatagctgggactacaggcacgtgccaccacacccagctaattttttgtatttttagtagagatggggtttcaccatgtttttttaaagattagaattgggccagacgtggtggctcacgcctgtaatcccagcactttgggaggccaaggcgggtggatcacgaggtcaagagatcgagcccatcctggctaacacgatgaaaccccgtctctactaaaaatacaaaaattagctgggcgtggtggcgggcgcctgtagtcccagctattcgggaggctgaggcagagaatcacttgtacctgggaggcagagcttgcagtgagccaagattgccccactgcactccagcctgggggacagagccagactccgtctcaaaaagattagaatcggtatatacctttttattctcctcccttctttttcttggtcttttatagtaaaaaaaatagtatgtgaggaatgtgtgtgtggcttgttttaatgtttttctctcctaaatgatatagaggggtatgaaatggaaaaataaaatttcctttttcttgtcctctgtaaaccactcagctccgggttctttcagttggcattggttctggtggtctttgtcatcttttctcattcttccacctcagaaccatcccccttgctgtgtttccctgatgcttacctgtgattttgttctcgaaggtaatgcgtccaacctcagtttatatgtaagtgtggctgaatggtctgacataggtctgtgtaccgtagtgttcaatcagaaacgaccctattgatagaatgctcacattcctttcagtggcagtgaatgtaatagaagtgattgatgggagagcacatgctaagtggatcatccttgctggtgactacataagtatacaaattgttctttgattagtgactatagctgctgttgacttcttttaaaatatttttaagttttatttttaatagatagaatttacatagttcaaaatacacaaaagggccagacacggtggctcatgcctagaatcccagtactttgggaggctgaggcaggagggtcgtttgagcccaggagttggagaccaacttgggcaacatggtaaaattccgtctctaaataataaaaacattagccgagtgtggttgctcacgcttgtggtcccagctgcgtgggaggattgcttaaacttggcagtcgaggctgcagtgagccgtaatgacgccactctactccagcctgggcaacacagctagaccctctctcaaaaaaatatatatatatttatatgtacacacacgtatctcttttctctcctgtcctctaacaatttagttcccttcttggggacaactaatgttttcagttccttttatatctttccaaaaatattttatgtgtatacaaattatacatatattcatacacatatatgtacactcacatatatgtacccaaagacttttttttccttgtaaacataaaagtaataccaatgcaatgtaaatgctacattggttagggaataatgacaagaaaaaagtctgtaaatgttgagtacagacataattttgttttttctctgaatattttccatctatggttgtttgaatccacaggtgcggaacccgtggatacagagggccgattgtaatttatttaattagttccataatgatgggcttttaggttgtttctaatgttatgctattagcagctgtttaattccaatataagggatgtggaatcagtgagtggtcctcaagtgtctgaaaaaaattcacttttagaggagtatcaacgtttttgggacataagaggctatatagaattcttttcgttctgcagacagttggtaagcttttatgaagtttatgaagaatagaaaggcttatagtcatcctctccttccttctctcttatgaaaatcttttacagtacttcagaagtttctccattctgccttgctaaggctctgacctcttttctttttgctatctttcaattgtatatgcatcagtgcaaggggttagaagaaagcattctgtctcttcatccttacctgtgataatagctctatcccatgtttttcttgagttatgctgactgctaatctatatgtaattatgaggagctgtgtactctcaatcaaatttcttctaagttcttaggtccaaacaggcacaccaagtatttaagagtccagtcatgaaaaggagctagcagagtgggaactgtgaggaccaggggtagctggtggtgctgacttcagcactcctgagtcctggccctccctctgtcccaggaggaagaggaggtagaacgggaaatcattaaacaggaagaaagtgtggatcctgactactgggagaaattgctgcggcaccattatgagcagcagcaagaagatctagcccgaaatctgggcaaaggaaaaagaatccgtaaacaggtcaactacaatgatggctcccaggaggaccgaggtgtgtgtggccggccccgccccccacccatgggccgttccactagagcagtgggccccgctcatctgccctctctccctccagattggcaggacgaccagtccgacaaccagtccgattactcagtggcttcagaggaaggtgatgaagactttgatgaacgttcagaaggtgagggctgtgctttttttgttgcttttctaaatgttgctttgtttaatatcctacctgtgtcactcattcatctttttcttcttgcagctccccgtaggcccagtcgtaagggcctgcggaatgataaagataagccattgcctcctctgttggcccgtgttggtgggaatattgaagtaagtgccatacgattctaaggaggggtgagtgtcagatattgcatctttggtggaatgcgacctgctgcctctcacctgggtttcttcttcccctaggtacttggttttaatgctcgtcagcgaaaagcctttcttaatgcaattatgcgatatggtatgccacctcaggatgcttttactacccagtggcttgtaagagacctgcgaggcaaatcagagaaagagttcaagtgagttgagggctggagtggactgatctagagcaagggcttctgctatctatctggtcattccatggttctaggcctagccgtgcagggaagtgggctattttctctgttgaagttggcaggtgaagctgttagtaatgtgttcctagcttccctggaagagaacctgggtcttcttgtggggtctagagatcagccttcccgtgcagtggtgggctttacctcaaggtggagccatagttattgcctgtgataatgcctcacgaagggatggaaaagaatctaagagtcagcatgatccctatttaactctttctctacttctttacacagggcatatgtctctcttttcatgcggcatttatgtgagccgggggcagatggggctgagacctttgctgatggtgtcccccgagaaggcctgtctcgccagcatgtccttactagaattggtgttatgtctttgattcgcaagaaggtgagccctgagcctcttgccattgtttctagggggccaggcgcagtggctcacacctgtaatcccagcactttgggaggctgaggcgggtggatcacttgaggtcaggagttagagactagcctggtcaacatggcgaaaccccatctctactaaaaatacaaaaattagctgcacgtggtggcgggcacctgtattcccagctactcagaaggctgaggcaggagaattgcttgaacccgggaggcggagactggaaggccaataggaaaggagcctgtagctggaattgggtcttcaacttcttgtcccattgctacaggttcaggagtttgaacatgttaatgggcgctggagcatgcctgaactggctgaggtggaggaaaacaagaagatgtcccagccagggtcaccctccccaaaaactcctacaccctccactccaggggacacgcagcccaacactcctgcacctgtcccacctgctggtaagtctgcctgtcctatcattttctgtccctctctttttgtcctggcctatttttctgctcccctgtgctcagttctaacagggtagtctggcaggacacacagcaattccctctcagtttaggagggccgtcctaagaatagggctggctcttaaaggcacgagaggacaatttaagatgagacaaactgggaagaaatgaccttctctctgatctagtaccttcttcctaattgattgtcttttattgttctgcagaagatgggataaaaatagaggaaaatagcctcaaagaagaagagagcatagaaggagaaaaggaggttaaatctacagcccctgagactgccattgaggtaagagatggggtgactgaatgccatactaaagacaaatgtgtaagtccagtcttccttttagttgctggcctgtctgcttcatctgttttgtttttgtttttttttcctttgaagtgtacacaggcccctgcccctgcctcagaggatgaaaaggtcgttgttgaaccccctgagggagaggagaaagtggaaaaggcagaggtgaaggagagaacagaggaacctatggagacagagcccaaaggtaaaggtatccacattttttttgtttgtttgtttgttttgagacagtgtagtgctgccgccaggctggagtgctgtggcgcgatcttggcttactgcaacctccacctcccaggttcgagcgattctcctgcctcaccctcccgaggagctgggattacagacagacgccatcatgcccagctaatttttgtatttttagtagagacagggtttcaccatgttggccaggctggtctaaatctcctgacctcatgatccacctgcttttgcctcccagattgctgggattacaggcatgagccactgtgcctggctttttttttttttttttttttttcaaaggagttttactcgttgcccaggctggagtgcaatggtgcgatctcggcttactgcaacctccgcctcctgagttcaagcgattctcctgcctcagcctcctgagtagctgggattacaggcatgtaccaccatgctcagctaattttgtattttttagtagagagggggtttctccatattggtcaggccagtctccaactcctaacctcaggtgatccacctgccttggcctctcaaggtgctgggattacaggcgtgagctaccatgcctggccggtatccatattaagcactacagatccctgtgtgaaccatggtcactcgtgaatttttgctggggctgtagagatatcaggaggaagcgacacactgaagaatcctgcacccttgattttaggtggcaggttttcccctaacttaaggtatctcttatgactttatttgttgttgttgttgttgttgttgttgttttcgagatggagtctcactctgtcacccaggcaggagtgcagtggcacgatctctgctcactgcaactcccgcctcctgggttcaagcgattctcctgcctcagcctctgagtagctgggattgcaggcgtgccacaaccatgcccacgtaattttttttttttttttttttttgagacggagtctcgctttgtcgcccaggcttgagtgcagtggcgccatctcggctcactgcaaactccgcctcccgggttcacaccattctcctgcctcagcctcctgagtagctgggactacaggcgcctgccaccatgcccggctaattttttgtatttttagtagagacggggtttcaccgtgttagctaggatggtctccacctcctgacctcgtgatccgcccgctttggcctcccaaagtgcggggattacaggcgtgagccaccacgcctggccaaaattttttttttttttttttttgagacggagtcttactctgtcacccaggctggagtgcagtggcacgatcttggctcactgcaacctccgcctcctgggttcaagtgattctcctgcctcagtctgctgagtagccaccatgcctggctaattgttttttttgttgttgttttttttttttttgagatggagtcttgctccgtcgcccaggctgatgtgcagtgcagtggtgtgatcttggctcactgcaacctccacctcctgggttcaaacaattctcctgcctcagcctcctgagtagctgggattacaggcatgcgccaccacgcccggctaatttttgtattttagtagagatggggtttcaccatgttggccaggctggtcatgaactcctgacctcaagagatccacccatctcggcctcccatagtgctgggattacaggtgtgagccaccacgcctggctaatttttgtacttttagtagagacagggtttcaccatgttggccaggctggtttctaactcctcacctcaggtgatccacccaccttggcctccccaagtgctgggattacaggcatgagccaccgcacccagctaatttttgtatttttaatagagattggggttcaccttgttggccaggctggtcttgaactcctgacctcaagtgatctgcctgctgctgtctcccaagatgctgggattacaggcatgagccaccatgcccagctgacattactgtaattgcagacatttagatgtgggtctatccaattggataatagtgtgcaacagaggagaatgttcttcctttaggtatagtctcaataacatttcttcccctaggtgctgctgatgtagagaaggtggaggaaaagtcagcaatagatctgacccctattgtggtagaagacaaaggtgggtgtttggagaagttgattgtggttcagaagaactctaaaaccagaagcaaggactgtatctgccctgcctccctgtccatactcatctagccattttatcccaagataaaagactgtacctgtccccacatttagttgtcagtgggccaatggcaccattttctgggtctgagagacacccaggtggagaaggggtgtaggtggatggattcttgtagcatacagtgttctgggtaagggcgatggtgctgggctttggctggagctgacatttttcttccccatattctgtagaagagaagaaagaagaagaagagaaaaaagaggtgatgcttcagaatggagagacccccaaggacctgaatgatgagaaacagaagaaaaatattaaacaacgtttcatgtttaacattgcagatggtggttttactggtatggaaatgaggggcccaccagggttagaaggatctgatgtgaaattggggttcttgtcagaaaccacggtacagggactttacctctttacctctgtttgatgagggaatgccaaactgatagtgggttctgtggagaaagccagaagcaaattatatgaaatggatccaggggtaggggatggtgggggacaagaataagtagctttttcaattctcacagatgtttgcttccccccacccccaaccttccctaaattcctcctcagagttgcactccctttggcagaatgaagagcgggcagccacagttaccaagaagacttatgagatctggcatcgacggcatgactactggctgctagccggcattataaagtatcctttgcctgaatctgtactgaggcttttggtgaaaggttctgaaggtcttttagtttgaggttcttactttccttgttttgtttttcctgagcacttttccaatagccatggctatgcccggtggcaagacatccagaatgacccacgctatgccatcctcaatgagcctttcaagggtgaaatgaaccgtggcaatttcttagagatcaagaataaatttctagctcgaaggtttaaggtgagcggttggggaggaatatattgcttaagtgacaaacttgaaagtgcgtaacgtcctgcagcagagggagtctgtccatccagcgcactgttctcactttcttcattctatggaaggctttgctcccaagtaacttacacattagggttgaagacacacagaattgaaagttaactaactgtacatgagctgtaggtgactatgtgtccaatcagtgacacactagtgcagaggggtttgtttggggaacactgcagattggagtattcaggaaagatatagaggtgggattgaattgcatctctgaagatgtagagctattagtcagtgggctgctggttgttttttttttttttttttttttgaggcagaatctctgtcgcccaggctggaatgcagtgatgcagcctctgctcactacaacctctgtgtcctgggtttaagtgattctcccgcctcagcctcctgagtagctgagattacaggcgcctgccaccacacccagctgttttttttggatttttagtagagatggggtttcaccatgttggctaggctggtctcaaactcctgacctcgaagtgatccacctgccttggccacccagattgctgggattataggcatgagccaccatgcctggcctggttcttttttctgggctaaaaagtgcctgtgtgggccaggtgcggtggctcacgcctgtaatcccagcactttgggaggctgatgcaggagaatcgcttgaagtcgggaggtagagatttcagtgagctgagatcgtgctacggcactccagcctgtgcaacagagtgagactctgtctcaaaaaaaaaaaaagacgtgtctgttgtctcgtacgctgagtataatcggggaagaaatggtacactaataagccttcaggtattatgtactaagcaatgatgtgcccagggataaaaagacaaagcatggtatctgttttcaaggagctttcagtttcaagtaggagcacatgtgtaatcaaatgaatgccattctgcatatcaggagagagattgctgattggcataagaaagttctccagaatcgcttgaacccgggaggcggaggttgcagtgagccgagatcgcaccactgcactccagtctggcgacagagcgagactcacctcaaaaaagacaagaaaagaaagttctcagagaggcagacacagtggctaatctcagcatttaaaagagctgattgcttgagtccaggagttcaagactagctcgggcaacatggcaaaaccccatgtctacaaaaaatacaaaaattagccagttctggtggcgtgcacctgtagttccagctacttaggaggctgcaatgagcctagattgtgccattgcactccagcctaggcattggagtgagaccctgttttgttttgttttttcctgagacagtgtcttgatgtgttgccaggctggagtgcagtggcaagatctctgctcactgcaacctctgcctcccgggttcaagcgattttcctgcctcagcctcccgagtagctgggacaacaggcgtgtgccaccacgcccagctaatttttgtatttttagtagagacagggtttcagcatgttggccaggatggtctcgatctcttgacctcatgttctgcccgcctcggactcccaaagtgctgagataacaggcgtgagccactgtgcccatccaagaccctgtcttaaaaaaaaaaaaaagttctcgagagggaattggagtagggacggaactcacaaatggctttatggagaagatggcattggaatgaagttttgaagaatgcgacggagatttttttggtagaaacagaagggtatctgaacaaagggattaggttgggcaaagatgtgagccagcaaagcttagtatgtctggaaatagcagatagcccagttgagctgtagggaaacatttgtgttgggtgatggtgggaggtaggttggaacgagaaaggtggacgggctagaggtcagtaggtgggttcttggcaccagataagagagtttggactttacgctatcgttaatgggcagccactgaaagtttgtgagcagagttttgataggaccaagggaaatggaaacagcattcataagattataaaactgtcatataatcatgaggtgttaagggtctgggctgtgatgctggttgtggaaaatgaaaagggtaaagataaaggaaacaacaccaaagaatttattggacttagtgacttactgtaggggtcagcaaacctttttttctccccccaaaccaaaaacggttaataaaaccctttttttttttttttttttgagacaaagtcttactcagttgcccaggctggagtgcagtggcgacatttcctggctcactgcaccctctgcctcctggcttcaaccgattctcctgcctcagcctcctaagtaggtgggattacaggcatgtaccaccatgcctgactaatttttgtatttttagtagagatggggttttgccatattggccaggctggtctcaaattctggacctcaggtgatctgcccgccttgtcctcccaaagtgctgggattacaagtgtgagccactgcacccaaccacaccttttctattaaagggccagatagtccctttgtgggacatgtagtctctgttgcatatactcaactccatctttgttgtgtgaaagcagccacaggggatacataaatgaataagttaggatgtgtttcagcgtttcatctatggatattacaatttgaattttgtataattctcatgaagtggcatgaaatagtcttgttttgactttttgccaaccattttaaaatgtaaaacccattcttagctcttgagccatataaaaacaggtggtggggcagatctggcccacaggctgtagcttgccaactcctgacttactggatttgaggtacagaatgagtgagactgaaaataacattttgagcctgagtcactgagaaagttaaattgtcatttaagaagagagggagcagtttgtagaaaagaatgatatcgaattttagacaagtcttttggtatttctcacaaatcagcacccctcccactaccgacccccatcaccatacactagtgggatcagaaccagtgctgaaggtacatgtttgagaagcatcaaatcatctgcatagaactgctggctgacactaggagaggagaagggtatgagaaatcttctcttatgttgagtcatatgttttatgaatatattttttaagtaattaaaatcttttcataaattaagaaccaacattctgcctcttgggatatatttcaaagaatctttaatacagctccatcagatgacatgtgcatgagtgtttttgcagtatgatttttggtggtgggggcctagaggcaacataaatgttcagcattaggagaatgcataggtgaaacatgtattcatatcatggggcattaaacaacagaagcaacaaaattcatgtgcatacaacataagagtaccttttaaaaggtatgtagtgggagaagaaaaagcattttatagatacagaaaacatcattctgtaacttagaaacatacataggaaacagaaacagtttttaaaaacctacacaaaaagccacagtattactacattagaaaagttgcttttcagaggaatgggagtgagatggcgataagaggaaataaaaaacaaaaatatttttaaatagcaaaataacccctttttttttgagacagtttccctctgtcactcaggctggagtgtagtggcgcgatcctggctcactgcaacctttgcctcccgggttcaagcattcttctgcctcaacctcttgagtagctgcagttacaggtgcgcactaccatacctggctaatttttgtgtttttagtagagacggggttttgtcatgttggccaggctggtcttgaactcctgacctcaagtaatctgcccgcctcagcctcccaaagtgctgggattacaggtgtgagccaccgtgcccagccaaaacatgtttttgaagagtagttgataaagagtagatgataaaaaggaagatgcttaactgtgtaactaaatgaaaacataatatgggtatgtatatagtatgatctcagttatgtaaaaaactatgcacaaaaaaacctaaaaagaaaaatatcaggatgtatttctagaaggtgggattatctgttgttaaaaatttttgatattctattttctaaattgagtttttatcgcttttgtataagagaacctaaagggtaaagagttttaaaaatgaggacattgaaaaagggaaagaaaaaagttacaaggcaaagttaaactacttgggtgtgggaatgagctgtccatgaagttcttcataggttcttattaccatctgaaacaatgagaggtgagctgagaggccagtcagaagtgagtaaagtgagttatcagtcgaactcccgtttcctcttatcccttgtccagctcttagaacaagctctggtgattgaggaacagctgcgccgggctgcttacttgaacatgtcagaagacccttctcacccttccatggccctcaacacccgctttgctgaggtggagtgtttggcggaaagtcatcagcacctgtccaaggagtcaatggcaggaaacaagccagccaatgcagtcctgcacaaaggtagccagtggctcccctgcctcctgccgattcggcctccctgatctgactgcatcctaatgtacatatatttgttttcaaactttcagagctcctttgtctgggagtttaggaggtgctagggatctttgccatccttgggaggttagtatcttagaggcaatcaaggacagtagttctttgcctttttttttttttaaagagatggactcctggccgggcgcggtggctcacgcctctaatcccagcactttgggaggccaaggcaggtggatcacgaggtcaggagttcgagaccagcctggccaacatggtgaaaccccgtctctactaaaaatagaaaaattagctgggcatgtggcgcaacgcacgcttataatcctagctactcaggaggctgaggcaggagaatcgcttggaacccgggaggcggagtttgcagtgagccaagattgtgccattgcacaggctatcagcctgggcaacatagtgagactccagaaaaaaaagagatgggctctcaccattttgcccaggtgggtcttgaactcctggattcaagtgatcctccggcctcagcctcctgagtagctgggactacaaatatgtgccactgtacctggccacctcttttttttttttttttctgagatagagtctagctctgttgcccaggctggagtgcagtggtgtgatcttggcccaccacaacctctgcctcctgggttcaagcaattctcctgcctcagcctcccgagtagctgggactacaggcatgcgccaccacttgtggctaatttttgtatttttagtagagatggagtttcaccatgttggcaaggctggtctcaaactgacttcaagtgatccacccgcctccgcctcccaaagtgctgggattataggtgtgagccactgtgctccgccctggccaccttttttttttggaggtggaattttgctcttgttgcccaggctggggtgcaatggcgtgatctcggctcactgcaacctccgcctcctgtgttcaggtgattctcctgcctcagcctcctgagtagctgggactacaggcatgcccggctaattttgggtttttttgtttgttttttgagatggagttttgctcttgttgcccaggctggagagcaatggcgcgatctcagttcaccacaatctccgcctcccgggttcaagcgattctcctgcctcagcttcccaagttgctgggattacaggcgcctgccaccatgcccagctaattttttgtatttttagtagagatggggtttcaccatgttggccaggctggtcttgaactcctgatctcaggtgatccaccgcctctgcctcccaaagtgctgggattataggcatgagccactgcgccccagctaattttgtatttttagtagagatggggtttctccatgttggttagcctagtcttgtactcccgacctcaggtgacccgcctgccttggcctcccaaagtgctgggattacaggtgtgagccactgcacccggccacctcttttaactttaaacatattcaggttcttgagatggaaagcaaagcagaataatacagtgtcatttgcgatactttagaggtaacttcaggtgataaaagatcccttcaaattctagacccctttcaacattttgtttctaattaaagtaaaaggttatgaggaggcggagggtgaaataaggaaaagaatgctgttataatggaggtggggagacagattctgaaggtagagaagagaaaaaacgaataagctcaagaagaggaaatacaataatagtaagggatagtgaaggtttaggtgactttaaaaagcacaaaatcatggacagttggaactggaatatgaggagtaggaatttgaacatggtggaggtcaggtcagatgacagaagacaatacatcacagttacttggtcactgagaagtgatggggggctggtccactagggtagagggagctcagtctgggccaccacagctcaccacctctttttctccctatgcagttctgaaacagctggaagaactgctgagtgacatgaaagctgatgtgactcgactcccagctaccattgcccgaattcccccagttgctgtgaggttacagatgtcagagcgtaacattctcagccgcctggcaaaccgggcacccgaacctaccccacagcaggtaggaccattttcttcttgacaccacctcttcctgcagaaccattctggagcttgtaactttgctgtatgtccctagctttacatactgggtgggtggcctatcagtgaattcccttgagattgggtggattcctatcatctggaattctgactcctcgggtctccttctctaggtagcccagcagcagtgaagatgcagactgataccacctccaccgctgagcagtgaccttcctcactttctcttgtcccagcttctcccctgggggcctgagagaccctcaccttccttctgcccatcttccatgttgtaaaggaacagccccagtgcactgggggaggggagggagtgaggggcagtggtgcccttcctgcagaagagacatgcagcagtagcgctggcgccatctgcaggagctggcgggctggccttctggaccctggcttctccccactgtaacgcctgttacacacaaactgttgtgggttcctgccaggcttgaagaaaatgatctgaattttttcctccttttggttttattttgttggtttattttgtgttttcttttctcctttttggggggtattcagagtgggctgggcccctgggcgagacacagctacctctgttggcatctttttaataccaggaacccagcggctctagccactgagcggctaaatgaaataaagtggaaaaaaaaaaaaaggaaaaaaccaaaagcataaaaaaccacagcaaatttcttgatgaaaattgaaaataaaagtttccttgtattttagtgctctggttcagtgtgggtgtaggtgcaggtggatgagtgtgtgcggcaggagcctggcacctgtatagttgaaaattaagggctacgtggtgtcctgataccccactgagtaactgggttctgtgtgtgggtgcagtatgtgccttgccaacgttgacttccacctgtggaaaatgagaggctgcaaaactgcgggcaccgccgcttaatggctctgtgaccttgagcaagttgtttaactttggtgggatgcagatatctcatgtatacctcatacggttgtcaagttaaaccagtgaagtacatggaacggttttaacacctaaccactaccttaatgttagtttctaggaaggctgaggggggttttcttgctaagttgtgcaaaattgggatgcaatttgtggaagaacacagcctcaatcccacacccccggaggcccgacctaacgtcctccaaccttgaaacccttgtagttcaccccttctcatgtcccagaccaggtcagccttgcaacccgttgtttcccaactaattgtagacccacctgaaagcgagttccggcgaagaggccccctgcgaatgaggtgcagtgc

SEQ ID NO: 839 - DNA, 78000 bp, Homo sapiens
  source 1..78000: mol_type = genomic DNA
ctactaaaaataaaaaaataaaaaattagcggggcatgatggtgtgagtctgtagtcccagctactgggaaacagagatgggaggtttgtttgagcctgggaagttgaggctgcagtgagttatgatcacgccactgcacaccagcctgggcaacagagcaagaccctgtcaaaaaaaaaaaaaaggctatgtaacatgcccaaagtcacataattggcaaggagcagcagatctgggacttgaacataggcagattagctccaagcctatttgcttaacctctataccacaatgccttcttgctatggtaaaacatctgaaaagacctattaccctataggtcctctaaggaggcatgtcgccttcctcttagcaatactagattggctccaacagaaggctgtgggcttctctggcacatgcacctgggtaggacccagagaatatctgtggagtctgaatcaacccaaaagccaatatccatccgttcatcaggaaccccagcctacaacgcaaaagaggaaatcttcctaagtagaaataaactgtaataaattgcagaggttccctcgtcctggttttcacttcatgttttggatgctgcatgctgggtgagcggagattccaggcactggccagggcagctgccctgactccaagggctgccatgaacaacttccaggccatcctgactcaggtgagaatgctgctctccagccatcagcccagcctggtgcaggccctcttggacaacctgctgaaggaggacctcctctccagggaataccactgcactctgctccatgagcctgatagtgaggctctggccaggaagatctctttgaccctactagagaaaggagacctggatttggccctcctggggtgggcccggagtgggctgcagcccccagcagccgagaggggccccggccacagtgaccatggtggtaagttggcatcacttttaatcaaggagaaatgacagactgtagacagctcaaggattttccctcctctctgaaagggaagtcaatgggaaggcagactggtgagaaatccaagtgtctagtgagctggcaggagcagtgaaaacttggagcactgtctctgttgctgggtgtgctggagcgaacggcgtgcttcccactctgctggaaggaaccatcccaggggcacgcagccaaatgcctgcttgggttcactccctgagccctgacgatacaccaacattaacggggcatggatggacagatcagctcctgccttcaaaggggtctgctgtctagtggggaagatggatgcaggcacaatcagtgtgagtcaaaatgagagaaatggggccgggtgcactggctcacgcctgtaatcccagcattttgggaggccaaggcaggtggatcacctgagatcagttcgacaccagcctggccaacatggcaaaaccctgtctctactaaaaaatacaaaaaacagccagacatcctggtgggtgcctgtagtcccagctactcaggaggctgaggcaggagaattgcttgaactgggaaggcagaggttgcaatgagccgagatcacgctactgcactccagtctgggcaacagagcaagactccatctcaaaaaaaaaaatagagaaatggggtgcagagaaaggaggagccagagaaaaagctgaaagcagagcccactgtgtgtgttgggggggggcatgtgtgcgtttgcatgcatttgcttgtgtgtgcatgtgtgtgtctgtgtgacacacagagacagaaaccgaaagacagagggagagcgagaaaggaagggagagaaagacagacacagaaagagacagagagacaggcagagacagggagaaaagggagggagaggaaggaaggtggaggctgatggaggaagagaaaaagggagaaggtgggggaaagaaagagagagaaagagagaataagaactcgcttacgggagagagaatgaaggccttatttttaagagcgttggtggcacacaatcatctcaaaccagaaagacaagcctgcactgtcctctttccactcacatccttggctcctccaactttttacgtctcctacccacttacaaagaagtcctcccttcattgtaatgtcacaactttctttctttttttgagacggggtctgttctcttgcccaggctggagtgtagtcgcatgatcacagctcactacagcctccatttgcggtgcttaagtgatcctcccacctcagcctcccaactagctgggactacaggcatgcaccactatgcctggctaatttttttttaattattttttgtagagatgaggtctcactatgttgaccaggctgcttgcgaacccctgagctcaagcgatcctcccaccttggcctcccaaattgctgggcttacaggcatgagccaccacacccaacctggtcataactttctaaagacggtgtttgttccatctccttctgaaatgcaagtcttgagagaataacagtgattgacattgattatttagtgtgccagaaacagcctaagcgcaatctagaaccctcttacttctcccttgaccttgagccctttgatccccatccttatttaacacttaaagaagaaaacagactctgcccaggggtgacgcaacttgcccaggtcccccaggtgggaagcggtgaagactggatttgaagacagacaagctttgatcttcaacttagccttcagggcatcaaatgcattttggcggccttatcttgggcaccagggcagtgttgtttaccagctttcctgccaagacaacatttctacagggctggttcttcttgtggtcaaattctcacccaagtggtttccatcgtctattggactcctctttaattctcttcctcctaacagtcacctaggcaaaggggcatctttaccacccaaacattctcccttggcttctcaacaggggcgcagacagccagtgtggtcttgatggtggcacagatgccacctgggggagaagccagaaccttcctctctccctggctgcagcccctcctgccccagccacatgtgccttcactgccggacacttcagcccctcccaccccctctttccgagagtgctggttcctgttatttaactctgtttcctccctcgggaggtaatatatttatttctgatcccacgtgactccagaaagtggaactgcactcggggcccagtgtggtcttcggggagctgggaggggtgcagggcaagttgctcttttcctgctttctctttctgccctccagccagcttccctccagggctgccaggcttgacctgcgacagtgggcaggtgtgctgctgctgggcagctctcagaggggaagaaagaggacagggcaagagaattgcatggtttgtaaacaaagggcactgactttcattttgatgggggttcggaaaaggaaatcatccatgtggggtttttgtgaccctccctctcaaccactctataatgaccttggccctctgctgtgctaaacgctgcactggctcccacgttactcagagaaaaagctaaatctggacaatggcccacaaggcctttcctacctcatcagctccctgctctcatcccctactcctgtctgccttgttcatctactccagccatgttggcaccctcgctgttccttagacacgctcagcacactgtctgcctcagaacctttgcacatgccgttccctctgcctggagcactgttctctaagcattttcttggtcaacctcctaaattccttctattctttgcaccttatcaatgaagcctgccctgaccaagccatttagaattgcaactcctccctccacactctgagccccctccccagattgattttttccccactttttttttttttgatacagagtcttgctctatcgcccagcctggagtgcagtggtgagatctcagctcactgcaacttccatctcccaggttcatgcagttctcatgcctcagcctcccaaatagctgggattacaggtttgtgccactatgcctggctaatttttgtatttttagagacagggtttctccaagttggccaggctggtcttgaactcctgacatcaagtgatccgcccaccccacaaagtactgggataacaggcatgagccactgcgcctggctccccaccttctgtatatcttacttttgtattacgtgtgtgttgtttattgtttgaccctcccactggaaaataaactccacatggacatggatctatgttttgatcacaatatgtcccaaatacctagcacagggcctgagcacagggtaggtatgcaatatatatttgttgaatgttcagtggatggatgcgttgatgagtgggtagatggatgaatggatagttcatgtaatgccattattcctactttaccaatgagtaaactgaggcacagagaagttaatgatttgcctctggtcatgacctgaggagggagactatggggtctcatgagtcctggccaattgcagtacttcctgcaaaaaaaaaaaaaaaaaaaaaaaaaaaagtactgctttagcttcctcttctaaacaacccaaggggctaccgtaaatctaccccaaatagggtggcagtcttcaaactgaaaccagcctgatgattcagaagtccccttcagatattgcagtgccttaggtgcaattgtgcagaaagcccagttctggagatgggagcttaggggtttcgctctgtgctacactgagcaacctgtgtgcatccagccccaggaaagttccagtgagtcccaagagtcaaagtccttgccctggaggaactcaggtgcctcagtgggaagttaaagcaaacatttaggcagtccctggtcaacagtgggtcacaacatctgaacaacatctatcagaggccaaagaagggggagctaggatgggtgatgatggaaaaagaaccaggctggaggctggacagctggacagctctggatctgaagccatgttctgctccttacgtaccatgtgaccttggccacatgactagaccactcggaatctcagtttcttcatctctgaaatgggagcaatgatacgaatctcccagggctctagtgagggttaaatgagatggtaggtagaaaccttccaaggcagtgcttggcattaggtcgcactgtataaatatcagaccactctgagtctaacagcaaggagaatggaacaggaagaagataaaccaggggtttgaggcaccaagaaaaataattactgcagtctgggggccccagacaatatctagacacctaccccatgcaaaatgcagtgctgagtgcttgggtactgtgcatatttgagaaacaaatcaatgtggcccctgccctcgagttgaactggcacatgggccatgtcctcagacagcctgagtgcctgtcctgccttcccaattccaagaggtatgactttgagcacttcccgggcgccccgcctcagtttccccatctataaagtggagatgataatagcattcagagtcactgatctaagggctcagggacaccattcagtgtaagccccatacactccctgcaagaggaagctggttctgactcagccttgaggctggcgtctgaggcaaccacaagcccaacgtgcatggtggaaagatgactgtaagtgggggcaacctcagctggccttgggtttgaccatggaatgcgaggcacaaaggggcccattttgcatactttctcagaggctgtagggcacccctgccagggtcttacattttattgattcctctgactctactttgttggttgtttttgttgttctgatttcattgcgtgacatttttgcccatgaggtctcagttctaggaatgacagaacaaaggctccctctgggaagtcgcctgatttattggaaagggaggaacaccccacccttagggatcgctaagctcccttcctccagcttccttccccatctggcccttaggatgtgagaaaccagagctgtgacacaccagagaggagagaggctgtgccctctcaccttctgggcttcctttcctgagaaccagcccctgttctgattttgggagtctcctttgcctcagggagggggatgtgttggcgaggaagactcgtgcctttcatcttggactgcttctctggccctctaccccaggaaccacagaaggagacacacctgtacccggaagctggcatttccccatgggttttcccaggccagcctgttccaaacacagcttgcccccaagcctggcacttctccaaccagtcacggtttctgttctctgttgctatgaccttgagcagttcacctgcgttccttactgtctactttcccatccacctacctgcctgccctccaactttcctgatctgtgtacctaccttcctatatctacttctttttattattattatcattattctcaccctgtcttttttttaattttttttgggtgggggggacacagtcttgctttgtagcccaggctggaatgcagtggcgtgatctcagctcattataacctctgcctcccagattcaagcaattctcctgcctcagcctcccgagtagctaggattacaggcgcctgccaccatgccgagctaatttttatatttttagtagagacagggtttcatcatgttggccaggctggtctcaaactcctgacctcaagcaatccacccatctcagcttcccaaaatgctgggattataggcgtgagccactgtgcccagcctctcgccctgtcttatggtggtaatctacttctcaatttatctatttatatctactgtctacatacttatacacttatttactcatgtctacttatcagttaatccatttctctacctacctaatcacccatatatttcccatgtatttacatgtcaaagtatttccctgcattcctaccagctaagccccctttacaacaatccatcagcaggtccaggttctcatacaccctcccatgtccctccctaatttggatacatagcagttgtattctactcacctatctccctattcaccgatctctttctctccctttcttgcctcctttctttccttctcctgaatcatttatttagcacctgctagaaattatggtggactccccatccagtgctctttcaccaaaaagcatgagatgaagaaggacttttaacctagtaggggaggaatcttcatccatttggaactggaggctgccttgatcattcaaatctaaaactccattcattccttcaaatggtcttagaatagtgtatcttctattttattattttattttattttttgagacagggtcttgctctgtcgccaaggctggagcacagtggcgcaatcacagctcactacagcctcaatctcctgggctcaagacatcctcccatctcagcctcccaagtagctgggactacaggcatgcaccactatgcccggctaatttttttatttgtggtagagatgaggtctcgctatgtttcccacggctggtctcaaacttctgggctcaagcgacatacctgccttagcctcccaaagtgcagtgtgccactgcacctcgcctgataatgtgtctttcaaatgctcagtcttgtgtaggtattggggtaagtgcagaaaattaaagacctgatcctagacattaacagatgtatgatctaatcagaggtagcagagatgatgcttatgaacttgaaagttaaagttgtattgccaaataatgttgcagcaagttttgtaaaacacagcaaagcaagaaaattatagttagctggaagcgcgatgaaggtgggaactcgagctttgcaggatggctaaaatatagaccaaaagggagaaggcaggagagcagcaccgggagggagcaagctcccagcattcttccttggcttgcagggaaccaaggtgcaaaggtaggactgagcagaatctgttttgggagactgcagcaaggaccggcaatttttccagaacaactgttctttacttggaagacctagttactccccatctctccctgggacttgccaggggaccccagcatggcaaccttaatgatggttctgctgggtgctagtggttgctggcatgctagtttctgactcgagacaaataaattcagatccctagggtaagaccggcttcagcagcacctctcctgacaggggtcccgtctcaggagagaactgactttgtcccaagcagacctgggctcggggaatcctcatcacctctgcaagagttttttgttgttgctgttgttgtgttttgttgtgttttgtttttgtttttgattttttgaaatagagtctcgctctgaagcccaggctggagtgcagtggtgtgatctcggctcacttgcaacctccacctcccccaggttcaagcaattctcctgcctcagcctcccaagtaactgggattacaggcgtgcaccaccacacctggataatttttctatttttagtagagacagggtttcaccatgttggccaggctggtttcgaattcctgacctcaggtgatccgcccgcctcagtctcctaaagtgttgagattacaggcgtgagccaccacgcccggcctgcaggagtctttaagaggcaggaacaaggatgcaggtgtttcaacagagaggaagcctggggtgggcttcattcctcctcgtgctctttgcccccattcactcagtgctagaggttgtcattctgcctctgagacatccggccccctccctctccatccccacaccctcacctgccacagctgaaatccaggtgtgcctcagctcctggctgggtaccactgccactcatctgtagactctctaccctggtgccttcaggtgccaaagtgcatcctctgccatcagtcaaacacacagtttgacggatgtcacttgctctgctcagagacctgcaccgacacaggcatggtcaggttcaggtcttgtggacaagaactgggtctggaggagtcagggaagatgtagatgaggaaggtggtactgaaacgaacctctggtacagggaagatgtaccaggcagctgcagtcacccaggtgagagatggtagtcctggctggcccattctaagttccaaagctgccttggccatcggtctgagggtgggatggggggacatcagaaccagctgtctctgagaacataaagggacccccatatgggacctcaagacagctgagcagtcagaggcgcctctcccgtggcaccaggtcataggataatgagacttcttagaatttctttctttttttttcttttttttgagactgagtctcactctgtcacccacgcttgagtgcagtggcactatctaagctcactgcaacctccacctcccgggttcatgtgattctcatccctcagtctcccgagtagcacacgcaccatcacgcccaggctaatttttgtatttttagtagagaaaggattttgccacgttggccaggctggtcttcaactcctgacctcaaatgatctgcccacctcagcctcccaaaggactaggattacaggcatgagccactgtgcctggtcattcttagaatttctgacattcaccatatccgtttgttagccccactaagcaaggctgtttcaaattgactcagcatttcttatttgtcaatttctaccccactcctcacccggggacttctgaaaacagtgaaggcttcaaagtaatcaccttacaaagaagggcatcatcctcatttcacacatggggaaactgaggaccacagagaggaagtaaagaggccaaggtcacacacctgctactaagttccccgtccagtgctctttcagcaaaaatgcatgaggcacacaagtcatgtttccaaaccttcatttcagtaccaccttcatcatttttgtgttttccacataacactttactattatttatgacagggttttttttaaccactcaccttttttacttatctttcttttctttttctttaggagaggcaggatctcactctgttgcccaggctggagtgtatttcatgatcatagctcactgcagcctccaactcctgggcacactcgatcctcccacttcagcctccagagtagctgggactatagttgtgcaccatcatacatggctaatttttaaaaaatcatttgtagaaaaattagctggatgtaggagaatggcgtgaacccaggaggcggagcttgcagtgagccaagatagcgccactgcagtccagcctgggcgaaagagcgcgactccgtctcaaaaaaagaaaaaaagaaaagaaaagaaaaattagctggacatagtggcaggtgcctgtaatcccagctgctcgggaggctgaggcaggagaatcagttgaacccagaacccgggaggcggaggttgcagcgagccaagatcatgccattgcactctagcctggcaataagagtgaaactccgtctaaaaaaaaacaaaaacaaacaaaaaaaaccccaacaatttgtagacatagggtgtcactatgttgcccaggctagcctccaactcccggcttcaagcaatcctcctgcttcggcctcccaaaatgttggaattacaggcacaagccacctggcccagccatctactttatattcaaataaaactttacgtcccattataaagggaaaaaatggcaaaaacaggaggtaaccatttaacaagaaagcagagtgatgttagattatagcaagatactgttgactgtagaaggctctgaggctagagagctgctttctataaaacagagtgatcatatattagaagaggtgttaaagacatgttcacaccaagctgagacttcctccttgataccaccaggaggatgggcagagactggaaaagacactaactttctccctatgggagtcagtattatttagcatcactttggcgggtcaccccaaaccatctgactacaagggtaccatatttgggttaacactcttttggtataatttatgttttagtccaatgtcttgggatgaaaatgacaggtgggccacttatgatctccagagaaattcagggcaatttggtgtgggagtaggcatggtagaggagagcagcatctaagaagtccccagcagaggctctcagcttgtcttgaggcatctgggcggagggctatgatactggccccatcctgcagaaggtggcagatattggcagctggcaccagtgcggttccattgtgatcatcatttctgaacgtcagactgttgaaggttcccccaacagactttctgtgcaactttctgtcttcaccaaattcagtccacagtaaggaagtgaaattaatttcagaggtgtggggagggcttaagggagtgtggtaaaattagagggtgttcagaaacagaaatctgaccgcttggggccaccttgcagggagagtttttttgatgatccctcacttgtttctttgcatgttggcttagcttggcgggctcccaactggtgactggttagtgatgaggctagtgatgaggctgtgtgcttctgagctgggcatccgaaggcatccttggggaagctgagggcacgaggaggggctgccagactccgggagctgctgcctggctgggattcctacacaatgcgttgcctggctccacgccctgctgggtcctacctgtcagagccccaaggtaaaaaggccgggaaagcatcttaatttagcgtgcagtctcagctggtcctgccattccagataaacagagaaaccattctgaattggggatgggggtgaggatgggaacaggagtctgtgtcctgctggggcaggccattggaagatgtgaaagagttgtctatttccttccaccggagggagacttcaggtcagccaggtgtctggagtatgaaccatgtatcagcaccgaaaggttctagaagtcagactttcgggcagtgtgtcactaactctcagcatgctggcctggctcggcccacagcaaggtcttctcgcctccctttgggtaaatactgaggggtgcctctgcaggacgggacctctgccagactccactccatacccagagaagcagggaaaccaaaattggagtcagccttgaggtgtagctgttgagccctcagcagctggggagagctggcggatgctgccctccccccagtttcctaatggtgttgtttaaaaagggtcaggggacgggggaacagatggtgggaagagcacagtgcagacacctggcaccggctctgaaggcagcatggcagctacaccgttggctgggaagggtgtgcccctgaagaagtcgtttacattctcgagtcaattttcctggagtgtacaatggacctgtgggaaagcctgtatgaaagggtaatgatgagggacctagcacagtgtccaatattttataggaactggaattgagctcataggagctcaattttattggcattgctgttgttggatggttaaaggggtggtatcccttttctcagactcccctgaaatgtatggtttgctttgaacccagagactgatgacaggtctgccggtgtggttgggtgcagccttaagttgctacgggaaagtgttggagggggagaagtcagaggtaaccttgccccctccctcaattccagatgaggaaattcaggcctgaaaagggaaagtgaccacctcaaagtctcatgccttggaggacccagcaggaatccaagacctctgaaaaggaccggcagggctcttgccacggctgggggtgtggtcatggtaacacaggttttccatccatggaaggtacctgagggattttctcttcctccctagggccagcatcagaggagtgaatagctcagttagctcatctcaggggccatgtgccctcggaggtggtttgccactttcacggttggactgagttggagagaaacagagacccacccaggggtggggacaagctccctgcaactcaggacttgcagatcacttgcccaagtggctccctagctcctggctcctggcccggggcctgggactctccccgaagtggggctggccactgtgaggaaccgactggaggcagggacctcttggatgccccaggcagttgggatgccacttctgataaagcacgtggtggccacagtaggtgcttggttgctccacagcctggcccgagctcagcgctgcagaaagaaagtgaaagggaaaaagaactgcggggaggcggggaggtaggatgaccagcggacgagctgccacagacttgccgcggccccagagctggcgggagggagaggccaccagcagcgcgcgcgggagcccggggaacagcggtaggtgaccaaagtctcctctgtaacccctaaggtcgggctgagaatcgaggctccgagactgtcagctacttgctcaaggtcacacagcaagtctgggaggatggggggatggaatatgcaaaatgtagggccgggaaacacctcgtttccagcatccccgcaacgactctgcgcgggaaccaggagccgggaacccggagcttggcttgctgtgcccagagctccggggccgtgggcgggtggcaggaaagcctggcggcagcttctgcagagaagccggagcgcagactgggagcgcggagcagacacactcccccggccacccttggccgactccgcgcgcccgggatcctgcagaggtgcgcgcccttcttgtacgccagactttggaccagggccgccgttccctgagcttcactttccctgttgggtcatattccatctctaactctggaatcttgggtattgggctctccaggcggggggccctgctcagggaggcagtagggagccaaacctttaaccagaggatgggataagtcctcaactctcgttgaacatcttggcgaaggtgtgtgttgttgggaggggtgggggagggatccccccggactgaaccgatctcttgatctctcacttctctacctcgctttggggccctgagtcacaccctctaaggagagaggctaaagcgccccggaaagccagcgtgcgaatgccggggtgggagtgggagattggatctccctggggtccaggaaagccggaatcggagccaccatgcttagcttagtctggaactcttaaaagccgcggtcctcctgagtcccacagcccctctccaccctaggtggcacaggagaggtggcaaaagcctagaagttcaaggcatggctccctccccagccgcagcctggagtgtctaactttggcaggaagtcttccgtttctgctccccactccagagaaaaaataaataaatacttctccggagtgagattaaggaaacaggtacttcttcctcttggagaaagaggagccaaaggaacttgactccaacaaatgatcaccttgcaaacccccggctcccttaggggatgacctggtctccaacaatctcagagcgtttggaggcagggtctttggagatgactgagtggggaatcccaggctccccacacatgaacatcacctgggatgatcaacctgttcaggatgtaggttcccgggctcacccccaggcccggttggctaggcctggggtgaggctgagatcctgcaggttaaaccatctatcccaggtgactccaatgttcgtttgtggggcaaaagtccctcaagtcagagacactgggaggcgctgatgtggtctcatctctttactctctccctgttacaaaacctctatcagaaaaggagtaccaggaggtgttttgttttgttttgcttaacgccacatagcaagcagtttgcagacgcaggatttgaaccctggtctactgagagcccagcccagtgcagcaagcagatgtgaacctccacaaatgcagggcaggtcccaggcagtcagagagaaacctgttgatacccagtctgtctgatggctggggcttggtttcatgtcctaagacccagcctcagataccttgagaagagcagaatcagaaattaacccaaggaaactctggattagttccaggcaatcagggaagtggctggagggaggtaggaaacttctggacttagcctcagatttgccttgagtcacactgacaagtgacttcccctctctgaggttcatctgtaaaatggataaaacatgagagcttgcttgatgatgtctgatgtgtacagaaaaagcactttagaaaaccaccaaagaatattcatgcattgggaataattattatagatcctaaagggattgtttagaaagatcagagaggggccgggagcagtggttcacacctgtaatcctagcactttgggaggccgaggcgggtggattgcttgaggccaggagttcaagaccagcctgggcaacctggagaaaccccaactctactaaaacacttttttgtgttttagccgggcatggtggtgcacacctgtaatctcaactacttgggaggctgaggcacgagaatcacttgaacccaagaggcggagtttacccgagaggtggaggttacccgagagctgagattgcaccactgcacgccagcctgggcaacagagcaagactgtctcaggaaaaaaaaaagagagagaaaaaagtcagagaggaaagcataggcagatgggaggtttccaaagaccaagacacacacagtcaaaagacagttcagaaaggggcattagttaccaccgattctcataggaaggacatagatagttttcagattccttcaatccttctgacatcaaggacaaagtctctgattttccctgatgtttgacagtgccctaatgcttgctaagatttctttttaacaaagtggtaaagaagctgagattattttagtaacattgtttctttttcaaccacaagtgatactgttggtttggttttgcttttccgtttatacatggaaaaaaaagttttctttttgtaaaatcatggtaaaatacatataacataaaatttaccattttaaccactttcaaatgtacatttcagtggcattaaatatttcaaactgttgtgcaacctccgctaccatccatctccagaactttttcatcctcccaaactgaaactctacccaataagcaataactccccactgccccttccacccagctcgtggtaactccaacttcctgtctctatgttttgggctactctagacaccgcctataaatagaattacgtgatatttgtctttttgtgcctggcttctttcacttagcataatgtcttccaggttcatccatgtcgtgccatgtgtaattcctttctatggcggaatagtattctaatatgtggatatcccatattttgttcatccattcatttgttgatagacacttgggttgttcctacctcttgactattgtgaataatcttgctaggtacatgggtggacaaatatctgtctgactccccgctttcaactctagaaagctttcttttaaaatcggtctatttaagtttctttaaaaagttaatttaagaaaaatactaaggtaaattgtagaacaggtgatatgtcaatatgaccccaaaaattgtaaagatggaagacgaatgcctgcagtttgggaaaccggatgagaggaaagacctggaagctattgtaaaatctatgctgagggtctggtgactactagaccaagggcatggcagcagagggcagctgaaagacttcaggaaggaaagatataagaattaagaaaggggcctggtgcagtggctcatgcctgtaattccatcaccttgggaggtcaaggcaggatgatggcttgagaccaggagttcaagaccagcctgggcaacagagcaagacctttttttaggaaaaaaatatataaattaataaaaataaatttttgaaaatacagattccaggccgggcatggtggctcacacctgtaaccccagcactttgggaggctgaggccggtggatcacctgggatcaggagttcgagaccagcctgggcaacatggtgaaacaccgtctctcctaaaaatacaaaattagccgggtgtagtggtgcatgcctgtaatcccagctactcggtaggctggtggaggagaatcgcctgaacccaggaggcggagattgcggtgagccgagatcacaccattgcactccagcctgggcaacaagagtgaaactccgtctcaaaaaaaatgaaagaaaatacagattcctgggcccggctgcagactccctgaatagaatcactgggggtgaggcccaggacgctgtgtttttaacacccttcccaggtaattctcactcacagccaagcctgccgatggctggactccgtagtcagatctcagcaagcaggactggctcgtggttcatcttggggtctccagcacccagcagagtgctggcggggggactgtgttaagtagagccggatgggtcaggactggagtgtggggcctggctttgctaactgcagtcacaagatcctcatcactccaccccctaccccagcaccagggtcaggttcccttccaggaaaaacttgttggactcctttccaggtcattgactgcagttaggagtggcatgcagaagggaggctatctggagctgggacagaccaggcaagcggggaagggaactcttatcccaaccctgcattctggacagggaccgaaggtctcctggctgcagctcatacagctcatcttcattctcatcctgggaccaccaggcccctcacccacaataactttaccctttactggcaaatgcacaagctggagatgatggcccattcgagttttaagattttccaagttgttatgaggtcagtgtcctcaatcgggacccagagaagataggtggcttgcctgaactttcagagggggcatctgtggtgtcttttgtggggtcctgtaggatttccacgtccctcttggaggaaaaatagaagtaagttgtctcaggtcagattgtctgggaagccaagtaggagatggagatttgcatataggaggtttactggggacattcacaggagggaacacccgaaggaaaagggaagaaagcagggttgggaagcagcaggagttgaggtgcaatgcagtcacaacagaggtcttagccaatcccatagggagcactcaagctgggacagcaaggaagctagaccttcacatccctcatctacctccgtcctcccatacaggcatagcctcccccatgatgaacactcagcaccagactgatacatttgttataatcaatgaacctacattgatgcatcattattacccaaggtccatggtttgtttacatgagggtttactcttggtgttgtacattctgtgggtttggacagatacatgatgtaatgtatatgacattatagtatcacacagactcatttcacttgtgactgagcttgtccttctttctttaacctgcctccaactgctgagaagccctttggctagggattgcagccaattttaatttgttttccactttcctgctctgaagttactttgtttgccagaggctggttggttcaaacccaaagggcagggagctgcaatggaaatccattcaacggtgctggaattgggatggcaaaaaggagcagcaggcaggtgtcagcagggagcagctctttgcatcccacagttcccagggagcttaccattctttcattcattcattcatcctttcatttatgagacaaagtctcactctgttgcccaggttggagtgcagtggcacagtcattgctcactgcagcctcaagctcctgagctcaagccatcctcctgcctcagcctcccaagtagccgagactacaagggcactccaccacacccagctaatttttgtatcttttatttctgaagagatggggtttcactatgttgcccaggctggtctcaaactcctggcctcaagtcatcctccctcctcagcctcccaaagtgctgggattacaggtgtgatctcagacagcttacctcttaatcacctttccatctgagctggcagcagagctgggaaagtgcacccaacaccccagatgctgcaactttagtgcttcctgctccttctctgtgtggaactggcctgtttgggtacccagggccagtcccctccaagaccctctgtagaaaaagaccctactgtacacctcaattccattgcaggacaggacataattgaatcctgcctctccctgccccagtcacccatccctcccaagccattatcttgggacctgcaagggcctccaagccaagggtggcaaatccaaataccaaaggggccataatgatgtaaaatgtgtccaggcagaaggcaatagggagtagtggggcctctggtaacaattgtgtgtactctatatagagacattgtgatggtgatttagacacacacacacttatattggcttgggaaacaaaacaaataggcctatcgactggattcaacttttgattttgcagccaagcccctgtggcacagctgaggagcttgcaggtcagaaaggggatttagagccaaccaatagcaatatctccagacctctcctgacacgaagctcatctgacctcctgcccccattacacacatacacatgcacacacatgcatgcaggcacatgcacgcacgtcttctagtctccctgccttgaggacaaatgatcagatcctgcaactgtttccaggcccataagcccctgagcattgcagtgttgctacatgccttagtttcctctccgtctcctgtgacctcctcgtgccactccaggaagtgaaagtcttgagtgagaccagtagtttctcttaagtcctctctctgtctcgttctcctgggatatctacacttggtttgcaaacagcaggctggagagtgaggggcttcttcctctacatccagctcctcccccatcctgctccaagtccagcatgttcctatctcttccccaggaccctgggctcttgggcacaaatcaagccatcaccagacagcctgtggggtggcaagagcagaggtttgtttctttgtgaacatctataggtaccaggctctgtgcaggccctattgttggtgagccatagaggtaccaacctcaccccatgaatcctcctttgtttcttttcttttcaacccctgggcctttaaaccttcgattaactgcccagtgcagcccaggtcatggtacactatgatctttggttcacatgagggttttctcttcattaatgtccctatttcccatactgggtgcccattctaatgcatttcaggtgtatctttctgtttgtatgtgctcttataaaacatgttttgccttttttttttttttttagatggagtctcactctgtcacccaggctgagttttctatttttagtagagatggggttttaccaccttggccaggctggtctcaaactcctgacctcaggtgatccacccgcctcggcctcccaaagtgctggaattacaggtgcgagtcaccacgcctggccacagtttcttacttttgcattctgtactatgtttttaggatctacttgccttgcttctgatgcatttgatctttgcttctaatcacggacattgttctctatggagtgcaggggttacttttcacctgtccacacccccagtgatggacacctaggtgacctccaactctctgtcaccacaaataacacagcagtaaccatcctcagatgggttctcctggggagttgtgggaacatttcttcaggatatatagacccaagagctgaattgccaggtggtaggatctacatatccttagatattctacatgatgccaggtcgttctccagagcggccccatccatctacattcccacaaacccgtgtaaccaacacttggcatttcccagatgtctaacttttgccagttgtacagtatcaagtgtcactttgctgttttatttttggagtttacatcttagtaccacttactcgctaagtcactttaggtaagtcacaacaacccagtgacataagcactgtgccaacaaaatgcagtcgattctgtgactcagagaggttgagtaacatttgcaaagtcacacagcaagtgtggaactaagatttgaacccagagcctgcacccttaaccactatgctattattatgttttgtctctctcctaaaatatcatctgggtctacattgcaagcctctttggcagggactgtgtggtaaacctctttggggccagtaaggaactgagctcagtgactttcttacggggtgctcagtgaatcattgttttacagctttagaggggaaaagtgagagatgtttcttagagtttatctggaggactacagggtgcatgagcaaaagcggaactcatttgagctactacccccacaaagaagctgtttggggtctggtcatggtagataggcattcctaggcccctggcttcccaacaccatttggcccccggaagcagcttgtcatgaggttggggagcaggttggtgttggggggggccttgggggaaaggaaaaggagaagactgccaggcaacgaggaatcagaatctcaaaaagactcaattgaaggggctccaacactcgttgaaacggaggctcagagggctaaggtaatgtactcaggatcaaaggcagagcagaaactcaaaccatgtctctaggcacacagttcagaggtcttcccattattcctcaggaggagaagttcatggtcaagagtagggaagtattccttctcaagctttttttttttttgtctgagacagagtcttgctctgtcaccgaggctggagtgcagtggcgtgatctcggctcactgcaacctccgcctcccaggttcaagcaattttcctgcctcagcctcccaagtagctgggattataggcacccaccaccacgcccagctcatttttgtatttttgcagagacggggtttcaccatgctggtcaggctggtcttgaactcctgacctcaagtaatccgccagcctcggcctctcaaagtgctaggattataggcgtgagccaccacccctggcctccttctcatgctctttaatcacagttcagagcagtgctggaggcttttaggggtagcaaaagagccttcttctccctttcagtgcctccttagaccctcaaagatagactccccgcctctgggaagaaaacatctaatgaactggacgtaatctcagcgcctgcgtctgtaaaatggctataataacaacaatctcccagagttgccgttaacagttgaaacagaatagtaaatgcaaggcatctagcacagccccagacacagagaaatctcccctggtcactctcacagaggtaagaagcacattaataataaaaatggtcatcacgcatattgtactcaccatgcagaagttgtgctgccttaagctactgttcattgagcacttactggtcgccagtcccctttctaagggctccatgcaacttaactcccctaatcctatgagttgccaattattatcccccactttacagataaggaaactgaggctccaagtggtttaaaaaatgaacttacccagattgtagtgcgttggtaggtagggataacctgaaagttgggaaatttcaccccaaagctcaccatctgagctccattcatctcccaccagctgagatggaacgttatgctgttcccagaagagatgcatgcactgatcttcagatagtttaagtctgagttagaacattgtggcgacacctgatttccctcgggggagagagaggtgaattgttatttcagacacctgtttagtgtctacacttagcctttcaaatcctgcatgcagtgtgaagtggggatgaaaataaaccccaaaaaggacttttgatggcaaaaagatcaggaatattttctcgagttggatgtggaaggtggtggcccagggggaagcacagtttcaaagaggaccttctaaaaatactgcccatttaccaaaaagacacagaccgcgcctctgccctgcccccacatggctcctcaaaaggagaaattgtcttgccacccacgccttccctcgccggggtgctggggggccaacagcaattcaaaaaggctatagagtgggctgagactttggagatgggtagtttggttcaaatctcagcccactaatccctctgagcctgtctcttcatctgaaaaacaggaatacaaatagctgatgtgtaagttagaccaaatggggtaatgcctacgagtcatgtcatttggtacctggcacttgctggacactgtgaattctagttctatatcattgccacggatgaagagaggctgccatgcgcagaaacatgctgagagctgggagaaggtgagctagagggatacagtccctgccctcagggagagctgaagggctctctctcctgccacgggatgatcagggccatcttttccctccatcccgctctggcaatgtggtttggagaaacagtccaatgaaggggcctttgaagcacttcctaagcatctatagacataggaaacttggctctggggatagaggaaggtcccatgccaagattcaagtagatcttggtgtgactgggaggcagctgtggcgttgtggggaaacctagagtcttgggcctgaatttcagctttgacaccctctaatgtaatgggcttcctttgactgtaggcttcccacatagctggcaccccacacagaactcccttggccttctgatgatcctgcaggacaatcttttttgttttttgttttttgttttttttttgagatggtatctcactttgtcgcccaggctggagtgcagtggcgcagtcttggttcactgcagcctctgcctcccaggttcaagcgattctcctgcctcagcctcccaagtagctgggattacagaagcacgccaccatgcctggctaattttgtatttttagtagagacgggatttcaccatgttgcccgggctggtctcaaactcctgacctcaagtgatctgcctgcctcggcctcccacagtggtgggctgcaaggcaatcttcattctccagaactaatattgggaaaactgatgttcagagaggtcaagtgacttggctaaggcatcacagccagaattcagatgcaagctcctaaaccacatgaccttggacaagccatttcactgaggcgtgtgaacctcctctaagctcaaatgggcataacactctaccctgccttttccccagagctttttgggaactcagatggtgtggaggatggaggcagaagtccactgtgagctgcaaatccttgatcacccaagaggaagtgcttaaggtgcaggcttcagtcttagggaagcaggaagtggggcgctgaaatgtgtattgggggcttctgggagggggtttcttcttgtccaggttgagccaatgacgcagatcttaggccctctggtgactttttgcccaggcaacttctcagtggtggtgatggggagcgtggccagaccatccaagctgccctgctggctgtgggggccttttttttttttctgagacacagtctggctctatcacccaggctggagtgcagtggtgcaatctcagttcactgcagccttgacacctccccaggctcaagctatcctcccacctcagcctcctgagtagctggttctacagatgcacatcaccacgcccagctaagttttgtgttatttgtagagatagggcttcaccatgttgcccaggctggtctcaaactcctggactgaggtgatactcctgccttggactcccaaagtgctggaatttctacagatgtgagccaccatgcccggcctatggggcccttcttgttcctatgaagtctgcagggtccccttatgcaaaagaacagaaagctcggcttcacaaagtttgacctcggaagaaatggaagggaaagggtccctttgtcactctcacaaacgtaagaagcaaactaataatgatggccatcacacatattatactcaccatgtagaagctgtgctgccttaaacttctgttcattcagcacttactgattgccagtcccattgctaagggctccgcgtgacttaactcccctaatccttgtgagttgccaattattattcgcattttatagatatggaaactgaggctccaagtggtttaaaaaatgaacttgcccaggttacagtgtgttggtaggtaggggtagtctcaaagttggtaaattttacgccaaagctcacgatacttgccttctttcccttctcaatttatttctctgactgtgtgcttaaccacacagcagtgtcatccagagtttgaagcagagctcatcaataagtgggggtgggctaaatgtctccaggctcctccctgcggtccctcccaccatcccccatctgtgataccacctgtgtctctatgcttgagcccagacaggacaagggtgatcatttcattgggaacattttgactggggggaaagagcaccagcctgggagtcttggcagggggagtgggggagaaggggcaggggcagccaccgacaggctatgaggtcttgtgcaagtcacgtccttcccggggtctcagtcttgtcatctgcagagtgaaggaaagaggtcaagcttgaaggtccctggcagacccaatgccctgtgagaaaactgagtttgggtaacttattattttatagatatggaattatcttatagaaatgttatagatatggaatcattttatagatatggcccaaagtccaaagtcacacaactcattcacggagttgctaggatcagtctggagctcttgtcacgagatcacactgcctcaaagaggaggcagattgctgcaatgtaggttcttaataaagagcatgggtggaatgggaggcgggcatcaggcaggagctggggcaaaggtgtcttttctcactgctctgagagaacagattttgtgcctgtgtccctgaccaaggggctgggagaggtggagcatctcacccccaaccatctcccagctttggccctgctccaggaaaagggcggtggccccatctttcagttctgcttcctctagtcatggttggctgggatctcgctgcaagccggttatgtttgggttcctgcagcccccgctcaaccgtcatgaacaagtgggcccagccagtgccccagcttggactggaaagatcattctctgtgacatccgggggtctgtgctgagcctctccccaggcagtgaaagctgtggatgcgtgaaagaaaatgggtctctgggccgggtgtggtggctcacacctgtaatcccagcactttgggaggccaaggcgggtggatcacctgaggtcgggagttcgaaaccagcctgaccaacatggtgaaaccccatctttactaaaaataaaaaaattagccaggcatggtggcgggtgcctgtaatgccagctacttgggaggttgaagcaggagaattgcttgaatccgggaggcagaggttgcagtgagccaagattgcaccactgcactccagcctgggcgacagagtgagactctgtctcaaaaaaaaaaagaaaaagaaaatgagtctcaggaatggggtggcaagttgagtgtgtgttttctcatgagcttactcttcaatgtattctcttctgggcccagaacagggcagtaggagcctccctctggtcttccagcttcagggccagctctcctcttacctcctccaggaagctccctctgtttctttccagccttcatctgcatgtcatgtgtggtgggttgaaaggtggccccccaaaagatatgtccatgtcaaatccctggaacctgtcagtgtgactttatttgggaaaagggtctttgcagatagaattaagttaaggggctgggtgcagtggctcatgcctgtaatcccagcactttgggaagctgagattggaggatcacctgaggtcaggagttcaagaccagcgtggccaacatggcaaaaccccatttctactaaaaatacaaaaattagctggtcatggtggtgagcacctgtaatcccagctactcaggagactggggcaggagaatcgcttgaactgggaggtggaggttgcagtgagccgatacagcgccactgcattccagcctgggcaacagagcaagcctctgtctcaaaagaaggcaaaaaaagaattaaagatcttgaaatgacatcatcctggattatctaggtgggtcctaaatccaatgacaagtgtctttataagagaaagagacttgctacatgaggagtaggtgatgtggccactaaagctgagtttagagtgatgcagccacaagaccacaagtcaaggatcaccagtagttcccagcagctagaggaggcaaggaagcattctcccctcgagcctccagaggcagcgtggccctgctgacaccttggcttcaacttctggcctccagaaccatgagagaataaagtgctgttgttctgagctacctggatgctggtaccttgtttcagcagccctgggaaatgaatataccatggaaacatggacctgaaccacggatcctggcaggagccttagagccacacagatgagccttcagcttggctttccccagcaagagctacatgatcttgaggaagctgcttgtcttctctgggtctcaagttcttcatctgccaatggagacaataatgcttacttcctaggttttaacagctttattgagatgtaattcacatatacaatttgcccacttaaaaagtacagttcatgcctgtaatcccaacactttgggaggccgaggagacaggcggatcacttgaggtcaggagtttgagaacagcctggccaaaatggtgaaacactgtctctactaaaaatgcaaaaattagccgggtgtggtggtgggtgcctgtaatcccagctgctcaggaggctgaggcagaagaatggcttgaacctgggaggcagacgttgcagtgagccaagattgcacccctgcactccagcctgggtgacagagactccgtcttaaaaaaaaaaaaaaaaaaaaaaaaaaaaaagtagagttcagtgttcttttgggaatactcagagagttgtgtgaccatctcccatccccacagtcaattttagcacatttcatcaccccctaaagaaactccagacccatcagcagttgttccccatttccttccaaaatccctctctgccaagccctaggcaaccactaatatgctttctttcttaaaaaaaaattaatagagataggcttttgctatgttgcccaggctggtcttgaacacctgggctcaagcgattctcctgtctcagcctcccaaagtgctgggatttcaggcatgagccaccacgccccacccctcctactttatgtctccatggatttgcctgttttggtcatttcaaataaatagaatcatacaatatgtgaccctttgtgtccggcttcttcacttagcattttttttaaggttcatccatgttccagcatgtatcagtgctttctccctttaatggtggaatactttattgtatagataagcaacattttgtttatccatttattttttggtggatatttgggctgtttttatattttggctattttgaattatccttctgtgaacattcgtgtataggtttttgtgtggatatatctggtttttcttgttttcttttgttttattaatacataatatgatacatatttatggggtatatgtgaatatttattacatgcatagaaggtataatgatcatgtcaggatatttgaggtatccacatttgggattgtttaaagattaaatgaaatagtgttaaaagtatttaatatgcccttcaacaaatgatgaggaaatcttagaatctgctcagactccttcagtttacatattaggaaactgaggcacagaaaggagcagagacttgctcaagtccacccaaagcagtagagcattgtggttaaatgcaggacttcagtcagactgtctgggttcaaatcctggttccacttggacatgggtttccttacataaatcacttcacctctctgagcctcagttttctcatatgcaaagtgaggataataataataccttccttacatggttactgatatgagtattaaatgtgccagctcatgtgcctggcgtataggaggtgctttataaaccttagctgttaccactcatggcattgccaaatgtgggacgggtctcctgactctctggtgtgagattgatggaatccacactttccagttcccttttctacctcctgggtatcttctcatatggttgtaagttccttggaggaagggaatgtggcttgctctctccaccacgctgagcatataagaggtgctgaatgagcgcttttattcactcctctcatccccagccctcaccagctgggagttgttgtaggtgtcaattttctgcctctttccaacaccctgtgaggtgactgagcattgtcttccctcccaggcagctcacagtgtgccaccatggagttggggcccctagaaggtggctacctggagcttcttaacagcgatgctgaccccctgtgcctctaccacttctatgaccagatggacctggctggagaagaagagattgagctctactcaggtgggccctcctccctctggtctcttccggtatcccccacccctcagcttgctgtagagacggcaatcaggggaaattctggtccctgccctcccgtcagcaccacggacagctcccacgtctgtgggacgctctctgcagatggggatgatctcccagccctgccccgcctctccctcgttccccaccagccctctttccagaaatttccttcttcatccaagggacttttcctcccagaacccgacacagacaccatcaactgcgaccagttcagcaggctgttgtgtgacatggaaggtgatgaagagaccagggaggcttatgccaatatcggtgaggaagcacctgagcccagaaaaggacaatcaagggcaagagttctttgctgccacttgtcaatatcacccattcatcatgagccacgtcagtcccctcccacagaaatcattgcaagggggatgcggagcaatggctggaggaacggagactccagggaagagaggggagatggaggccagtgggggaaataggccccttcactaatgaccaccaagaaaacaaaatctcatgtttacatcctccacctccatttctatacgcatttctgcttcttgctcttctgtccatcctttctacaaagcccataccatacacccctttcccttttcctcccagctccttagccaagctactctagtatttgtaataactagcatttactggatactcatagtatgctcattgctgtccatacattatcatctggaatccttacaacaacaaaggaaatacatattattagtttctgtcttttacaaatgaggaaattgaggtttagagaggtgaaacgacctacccaagtttgcattagagatagtaatgtacagatctgaaattctaacctaggtctttctcgtttcaaagtctccatttttaaccacaaaaaaagaaagtgtctggggttggaagatttgctaaggcttaagcagagaagctaatttgtagccttaagaagagctacagctttcagacaagggcaggactcttggggagaggtggtggtggtgttgctgctagtggtttgttttttgggggagagacgtgggatagagaatctcttctcaccagcatcaccaccacctcatacagagcctatgttgaaatagaaaaaagtggcctttttctggaggatgcagcccctaccaggaagtaactgcttggctagcaaagtgcaagccggagtcctgcccccattttccttgttggcttgggcacctgtgtgcagtgaacaacctgcaaaactcttcttagtggtcttcttcctgccaacccaggaacagcagcattcagcagttctgtgcttgatccaaatgtggccaatttttccccagagcacagtgtattgaaaatcataccaaggaagaaaatggaggggactagtaattgttcatgtttcagaaattacagaactgagagcttgactgcttccttcccttcctggggatttacatgggggaagcagaagtgattggggctgaggacattcacatttcctcacaactggaggcagtcattaaggatttgggcatgtcataggatttgggtgtttttctccccccttagtggcatctccacaggcagcgaaagctgtctaagcaaataggtgaggcagtgcgttagtccattttttgttgcttaaaacaacatacctgacactgagtaatttataaagaaaaaaaatatttcttacagttatggaggctgagaagtccaaggttaggggctgcatctggtgagggccttcttactggtgaggactctctgcagagtcccaaggcagtgtggggcatcacgaggcaagaggtttcggtgtgatagtctctcttcctcttctcataaaaccactagtcttactcccacgacaacccattaacttattaacctgtttatccactaatccatgaacggattaacccattcatcaaggaaaagccccagtcacctcttaaaggccccacctctcaatactgccacataggggattacatttatacatgagttttggagaagacaaacattcacgtcataacaggcagcttcacccaagtctgctcctcaagtctgtgggttttctctctgcttctggaaggtgaagcccaggcctgggcaagtattcttttgcagcatcctgaaatatgaccttagcttctaaatgtgtaaaatggagataataatcacacccaccatcacgggatggttgtaagactgaataagttacaatgtgtaaagcatttagaaaaggaatttgcacagagtaagcattcagtagatgttaggtactaccccacaaccaccgttatcattattatcaccatcattattatcatcttcattttcatcaccttcattatggccatcattccattcctcagctcagaagccttctatggctccccattgcttataaaatcaagtcctaactttccccagcatgaaacttctaccaccgtcacctatctctcagggtttcctaaacatactctgaacaagtttcctcactctgccactgtgacccagaaagctatctgttctccttctcccagactctgcctcatctttcaaggcctggttccaggatcccttcctccaggaagccttccctgattgccctattccaccatacaccttttttctcggacttcatgtcatggtgcctatattccaagggctctgagccatgtacccctttatatagttaccactatttactgagtgcctactgtataccagctactgtgttggatgctctagatgtagaacctctaattatcaccatcgattcctgggtagtaggcattatttattcatcttacacagatgagaaaatggaggcccacagtggttaaataagtagcccaagattgcacagctagtagggctagtggaaagtagaggtggaatttgaactcaaatcctgcagtaactctaccattctgccttgctcttctttgtagcagtagataagttttcatggatacatacctcatccttttgattagattaagggcccctggagtgtcagtgttcattcatttgtttgatcattcattcattcaacaaacatttcttgagtccccactgtgtgccaggcccagaggttccccagcccaaggcctggcacacagtgggccttcagttagaccttgttgattgactgcgcttttccttgtctgggcagcggaactggaccagtatgtcttccaggactcccagctggagggcctgagcaaggacattttcagtaagtttgtggtgggtggggaggtcttggctcagcctgcatttcctgccttgttccctggggggtgccctaatacctgacgaccattcattgatgggcagtcagacccctctccccaaggtgggtacaatagagactcaccttgggctttcattgattgtgtgagttggtctctggtttttctcaaagtagagcacataggaccagatgaagtgatcggtgagagtatggagatgccagcagaagttgggcagaaaagtcagaaaagacgtgagtgagcccctccctgatccaacctagccttgcttgagacctggcctttccttgactccaaagcctgctgtgggtccaacttgcttccctcgctaagtcctgtctggttgggaggccctttaaaagccaacaggagccttaaaatgtacatctgattatttcatggccctgataaccctccaatggctacaaaatacatgccacaaggcctgtatggcccttcctccctctccaaacccactatgagacaccacacttcagccaccaccagcttctccactcctataacccatgtgccctttcaagcctcggggcctttgcagttgctatagtctctatctggaatgcccttcccccagttcttcccatggctgactcctttgaatctttctggtgttggctaaactgtcacctcttcctggaacccttctctgaccatccttccatgtagattagctcagttattctcaccttgtgtgtctttttccttgcagtttagcactcattaccatctggacatattttacgccttgctctcccactgtgaggacagggaccttgtctttcttgctcgtgactgtttccccagcatctagtgcagtgcctggtatgcagtagcacctcagtagatatctgttgaatgaaaacatctgtaaaatgggtgtaacagttaactgagtacttattatgggtctgaccatgtgtaagtcctgtatctatttattcagttcttaaacaggtgaatcgcacacagggtatgagattttaaaagtgcaaagaatattcagtgaaggctgggcgcagcggctcacacctgtaatcccagcagtttgggaggccaagggggacggatcacttgaggtcaggagtttgatacctgcctggccaacatggtgaaaccgcgtctctaccaaaaaatacaaaaattagccgggtgtggtggtgcacgcctgtaatcccagctactcgggaggctgaggcaggagaatcgcttgaacccaggaggtggaggttgcagtgagctaagatcacgccactgcactccagcctgggtggcagagtaagactctgtctcaaacaacaacaaccaaaagaatattcagtgaaaaaaaaatctccctcccactcctgttctgtagtccctcagttttgctcctatcttagtcaacctatgtgaccagcttcctttttgccttgtcagaaataaagcgagctcctgtatttgctttaattttccatgcaaatgaccacattttatttacactattctgcattttgctttcttcatttacttcattactccctgtctgggaggtcacgttccatattattgagggagaggacacggtcctatcttcagcagcttctttattttctttcttttcttgtttttcttctttatgttttcatttgataaatatttccccccaagattttattgtgaaagttttcggccaggcgtggtggctcacatctgtaatcccagcactttgggaggccaaggctggcagatcacctgaggtcaagagtttgagaccagcctggccaacatggtgaaaccccatctctactaaaaatacaaaaattagccaggcgtggtggcgaacacctgtaatcccagctaccagggaggctagggtgggagaatcgcttgaacctaagaagcagaggttgcagtgagccaagattgcgccagtgcactccagcctgggcaacagagctagactctgtttcaaaaaaaaaaaaaaatgttttcaagatacaataaaagtgaaagaatggtactatgaaggtccatatacccaccatgtaccattttgattctacaattaatgttgggttttattcatcttatcacatctctattcatctgtccatccctctatccatccacacacccattcattatatttttggtacatttcaatgtacatttcaaatgtaaattgcagatttacactcccctcgtgtacttcagcatcctttcttttaaggccatgcagtgtttcgttgggtagatgaaccataatttgtttaagcagtcccttgctaagggacacgtgggtttttaatctgttgctgtgagtgcttgatactcactcactgatttctggcatactcctgcaatgtaggaaccaccacccccatttcatagatgtgagatcaaaggttcagagaagctgcattgcaaaggcacacagctaggaagcggttcaaaagcaggttcctttgttttgttttgttttgttttttggctcaaacccatgttgtgtccccatttgtgactcggcctcttctgctgctacactgcctggtatggtttgagatggggtttgggttcaagccaaggagctggggttggaatgttagagcgaggggaggaaaatggacccccaagaccactacccagccttgaagttaaggccgtatagcctgctagagtcctgagccccttctggcttgggacatcctctccctggggcagctgatcacatgttttctctgcagccttcccagaggagcttccggcagacctgaagcactggaagccaggtgtgcagggcaggtgggctggggttgggaagggtggatgccttggggaggggatggaagagattgaactcctggcccaagtctgatggggatggtgcatggtgcagcccctgcccttctttgggtagaggctgagagcttggggtcccttagagtcctctaaggggctcacgactgtttgtggaaggtggtaggggcttggagctaacagattgttcataggttctattctgccccagctctccgtgtggaggccctagggtcctgctcagcatagctctcagagccaagtcacaaggagaggactgggggactgcctggcacagagcagttgctgatcaacacagctgcagccagggctgagaagatgacaagcatttcctctgtcaggagagacatccatgccactccagggccctccccatcccaggaaggcccctccaagcacccagtctctaacacagcccacttcctcacagctgagccccccactgtggtgactggcagtctcctagtgggaccagtgagcgactgctccaccctgccctgcctgccactgcctgcgctgttcaaccaggagccagcctccggccagatgcgcctggagaaaaccgaccagattcccagtatgttagggggcttggagagagtgggctttctccctcttgggaggtggataaggagttgacactaaggcagggactgtcaggaactggacctcacctctccccaaccctatcagtgtcactcacctctgccccagccagttttatccttggggcccccgtcagctcaatccctggcagagaacatgcctcagaaggaaacacatccgtgcgagcatcaggagggaatctccaccaattagagcattcacctgccagccttattcgttcatcagctcttcatggagccccttctctgtgccaactgctctgctaggtgctaagaattccatcagggcaggacagaaacagctactgctcttagggaaattagggccctttaggggggtcagacattaatcaaataagcaaaagcagaatcgcaaacacaggtgctatgcaagatcccacctcactgcctttgtctcttgcagtgcctttctccagttcctcgttgagctgcctgaatctccctgagggacccatccagtttgtccccaccatctccactctgccccatgggctctggcaaatctctgaggctggaacaggggtctccagtatattcatctaccatggtgagtgcggggcctggctccccgaccacctctccctcctacctgactgctccctgacctcatcctccccatactccatgcacttggcagtggtgccctagcaccttctcatgatcctccctccccagcacaactttctctgtccctatttcccaaaaatcaaagcagaagagcagagattcctgaggtggtctgggtgcatgaccaagagtggttgtgtggccttccatatgttgctttccccttctgacccttagtttttccttattttttttaaatgtttttgtttttaaattgcaacatcaatacatgctcactaataagctaatgacaagtgatgtttacaagaattcactgtctctctcactcttttagtatactgatgtgaatagtttggtgtgcatccttgcatagctttctctgatttgtcttgtttcctaatcagtaaaatggtccctactgacccaccacactgaggggttgtgacttgtctcagggaaggtgtgtttgggctgtcagggatgagaccaggaggatgcttccactcaagtccagagcatccattcctggttgcaagacagtttcagtataacgcactggtatctcagaagcagagaagcagttcctgatatctaggaaaatgagcactgaccacacagcaggaagagtgcaatagtagtacctgccctaagttccttatgagctaattgcacccatttcacagattggaaaagcaaggttccaggagctagatgtaactccagagctctttcttcagctctgtcctgaaatatcttcctttggaagttctactctcttctctccagacttcctgagctccacagcccagtttggagtaggggtgacccaagtgcatttctggaatcaatacctggttattctcacaccactctccacccccaatgtaggtgaggtgccccaggccagccaagtaccccctcccagtggattcactgtccacggcctcccaacatctccagaccggccaggctccaccagccccttcgctccatcagccactgacctgcccagcatgcctgaacctgccctgacctcccgagcaaacatgacaggtaaggacccttagggcctgtgagaggtactagaagcaggatcgaggccctggggaaggaattgtctcaaataagatccacaagcaaagctgcctgtagggacaacaggtcatgtttaggggtcagtcgggacagggagggtctccagggagtggaggcatggttgtgggggaatggacagctagagaatccacatcccatccaaatacagccatcagccttcagctgcttgttacccagcagaaaagccagacaatgtggtcagatcttttgaagttgaaaaccctgatttttacatagatattgtgattttttaatttttattttattatttatttattgttgagatggagtctcactctgttgcccaggctagagtgcagtggtgcgatctcagatcactgcaacctccgccctacaggttcaagtgattctcctgcctcagcctccggagcagctggaattacaggtgtgcaccgtcacacccagccaatttttgtaatttcagtagagacaagtttaaccatgttggccaggctggtctcgaactcctgatctcaagtgatccacctgcctcgacctcccaaagtgctgggattacaggtgtgagccactgcacccagcctgatattgcgattttcttttttaaacatgagtgaaatttttaaaagtacagttggccaaagaaagacatatttgagttagatacagcctcaggccgctatcttataacctccatcttgggaaactcagcccatgaaggctgtaaggactaagtggcccagagggaggggggtccccaggggtaaccctcaccctaaatctggcacctgcttctccatctccagagcacaagacgtcccccacccaatgcccggcagctggagaggtctccaacaagcttccaaaatggcctggtgagtgatgcgggatctctctgccctgggtggtggagatggaagcccatatctggcttcacattgctcattcacttgacacttattcaaccccttctttgttggctcacacactcatttatttattcattcattcattcattcacttatttgattatgccatcatttcaccattcactccaccactccctcaaataatatttattgcccttcaataagcctgcactgggtgttaacacttcattgtcaggctgagagaatgaatgaggggcaagcgaatgatgaagtgagtgagtggatgaagtgagaagttgatgaggatgggagcaatggaaagtgggaataaaccagtgaataagagaattactaaattactaaatgcttactctcacatactggtctaagcatgttaggtatgctaaatcattaacatctcacacaatcccaatattatccccattttccagatgaggctactgaggcatggtgggatgtatagcatgctcagaattgctccagcaagtggtagaaccgggatttgaacccagacacgtgggctccactgtcttaactcttaacactccctcccatgacctccccatggtgagtgagtagtgatcaagcgaagaaaaagcttagtgagtaaatgaaggaatgagaaaagatggccatgcatggtgccttatgcctgtaatcccagcactttgggaggccaaggcaggtggatcacctgaggtcaggagttcgagaccagcctggccaacatagtgaaaccccgtctccattaaaaaatacaaaaattagccagacgtggtagtgggtgcctgtaatcccagctacttggcaggccgaggcaggagaatcgcctaaacccaggaggtggaggttgccgtgagctgagattgcgccagtgcactccagcctggggcacagggcaggatccatctcaaaaaaaaaaaagagagaaaaggtctaaaaggagtggacacttaaacaagagagacgatgagtgaaggaatgggtgtggaaatgagtgaactaatgaatgagtggtgggtgactgaatgaagcaaatgatgaagactgtatgggggccagatgtggtggctcacacctgtaatcccagcactttgggaggccaaggcggaacgattgcttgagcccaggagctcaagaccagcctgggcaaaatagtgagaacttatctccacaaaaaaacaaaaaagaaaaattagccaggcatggcagtgggcgcctgtagtcccagctactcaggaggctgaggtgggaggattgcttgagcctgtgaggttgaagctgtggtggaccatgattgtgccattgcacgccagcctgggcgacatagtgagaccccatctctacaaaaaaatcaaaaaattatctgggcatggtgtcacatgtctgtggtcccagctacttgggaggtggagtcaggaggatcgcatgagcccaggaggttgaggttgcagcgagctgtgatcacaccactgcattccagcctgggcaaaaaagccagaccctgtctcaaaacaaaacaaaacaaacaaacaaaaaaactgtgtggggaacagatgtaaatgatggtggcagtgctggccttgtggtggctggccctggccctgcctctcacatacccccaccctgacacgcccctggcctttgcagagccggtggagcagttctaccgctcactgcaggacacgtatggtgccgagcccgcaggcccggatggcatcctagtggaggtggatctggtgcaggccaggctggagaggagcagcagcaagagcctggagcgggaactggccaccccggactgggcagaacggcagctggcccaaggaggcctggctgaggtgctgttggctgccaaggagcaccggcggccgcgtgagacacgagtgattgctgtgctgggcaaagctggtcagggcaagagctattgggctggggcagtgagccgggcctgggcttgtggccggcttccccagtacgactttgtcttctctgtcccctgccattgcttgaaccgtccgggggatgcctatggcctgcaggatctgctcttctccctgggcccacagccactcgtggcggccgatgaggttttcagccacatcttgaagagacctgaccgcgttctgctcatcctagacggcttcgaggagctggaagcgcaagatggcttcctgcacagcacgtgcggaccggcaccggcggagccctgctccctccgggggctgctggccggccttttccagaagaagctgctccgaggttgcaccctcctcctcacagcccggccccggggccgcctggtccagagcctgagcaaggccgacgccctatttgagctgtccggcttctccatggagcaggcccaggcatacgtgatgcgctactttgagagctcagggatgacagagcaccaagacagagccctgacgctcctccgggaccggccacttcttctcagtcacagccacagccctactttgtgccgggcagtgtgccagctctcagaggccctgctggagcttggggaggacgccaagctgccctccacgctcacgggactctatgtcggcctgctgggccgtgcagccctcgacagcccccccggggccctggcagagctggccaagctggcctgggagctgggccgcagacatcaaagtaccctacaggaggaccagttcccatccgcagacgtgaggacctgggcgatggccaaaggcttagtccaacacccaccgcgggccgcagagtccgagctggccttccccagcttcctcctgcaatgcttcctgggggccctgtggctggctctgagtggcgaaatcaaggacaaggagctcccgcagtacctagcattgaccccaaggaagaagaggccctatgacaactggctggagggcgtgccacgctttctggctgggctgatcttccagcctcccgcccgctgcctgggagccctactcgggccatcggcggctgcctcggtggacaggaagcagaaggtgcttgcgaggtacctgaagcggctgcagccggggacactgcgggcgcggcagctgctggagctgctgcactgcgcccacgaggccgaggaggctggaatttggcagcacgtggtacaggagctccccggccgcctctcttttctgggcacccgcctcacgcctcctgatgcacatgtactgggcaaggccttggaggcggcgggccaagacttctccctggacctccgcagcactggcatttgcccctctggattggggagcctcgtgggactcagctgtgtcacccgtttcaggtggggtgaggggcttggggaagagacatccttgtgttgggcattaactgcggtcttggtgccaagcccagtgctctgtggggtctcttttagtatgcagagcagccgggtggggcagaatggattctctccatttttaagatgaggatgttgaggctcagagaggggcagccacttgccacacagcaagtgagaggcaatggcattctcccagtcaatatttgaaggcccgccatgtgccagtcactggggtatgtctagaatctgagactgacctgggctcaaatttgttttattctttccaccccctgagcacgccaccgttttcttatgctaagagtaaagccatggcctccccttggactctctgcctccattctctcctcttccactccattttgtattcagcaaccagaccaatcttctcagaacttgaatctgattgtatcccatccctgcttacaatccttcagggacactccaccactgtcaggatgaaggctaaattccttaatttggtttcattaagtcggtctgcaatctgcttgagcatttcagcttaatcgccagaggattgcttccatatttccccctaaacatactttacccaagctgtaaggtcctacataattgtgccaataatttagcagtgagcttcctggtagccgaagcaaaaagggaaagaaaaccactgtgtgagttgtgagaaagtaggaatcaataaaggctggagtggtcatggaaggctttctgggaaaggtagaggttgagctaaggaaagaaagtattttaataggtaggaggacccttcatggagctgcccttccattaaggtctagcctggtcaccgtgcctgggtctgaggccctccctccacagggctgccttgagcgacacggtggcgctgtgggagtccctgcagcagcatggggagaccaagctacttcaggcagcagaggagaagttcaccatcgagcctttcaaagccaagtccctgaaggatgtggaagacctgggaaagcttgtgcagactcagaggtgagaggagaggcggatgggaggtggttcacgccatgcaggttgaggacatgtaggacccattctcaagtttgtcatgggcatttccagtgccccctgtcctctgggacaccccatgccctctttctgggcaatggctaaccagagtctctcactgcactcgctgcccaggcggagcctctagaattgaaaactttgctgcattcaaaacctgccatcatgtgcccaagtcttagctaaagccatggagaacctctccccttctaggagttaacaaggatgccttgtgcacctagtaacagaagtgacacctactgccaccctttgaggcatttaggacaactgttgtcccaaatttatagacggcagagctaaggtccagaaggcagacaaaacttgattacagaacaagttaactgtctttcattcattccttcatcacacattgtttgagcgcctcttaagtgctgtctgggataggtactggtaagtgcctaatctgaggctcatttccatgaaagatacagtcctgagatcttttatttttatttttattatttcttaaagacagggtctcgctgtgtctaccaggctagaatacagtagtgcgatcatagcttactgtagcttcggaactcctgagctcaagcgatcctcctgcctcagcctcccaagtagctgggattataggtgcacgtcatcacaccggatgattttttaagtttttgtagacacagggatcttgctatgttgcccaggctggtcttgaactcctggcctcaagcaatcctcctgcctcagcctcccaaagtgctgggactacagtcacgaggcaccgcacccagacagatctttttttttaagagggggacaacagttgccccaaggaaagcaatccccctggggaatttggggcactggggcagccatcatgggacccatgggtaagggctcagtgacagcagtgcctgctccccctaacattgcctgttctctccaggacgagaagttcctcggaagacacagctggggagctccctgctgttcgggacctaaagaaactggagtttgcgtaagcaaaggggtggattgtcttgtgggtctgcgcaaggtttcccctgcagcattagctgggcttgtaccacctgaatggagatagatctccagaatcattcttaccctcttgcccaccactttggaaatagcttccagcagctggaaagtgaccagtgtgggcaaatgctggaggttctcagatttgaagctaatggacccgtttgctggttaacatggtcattcccatcactcattcaacagaggtattgagcacttgaatgactgaggctgctgtcctcatgagctgacagtctaatcaactcccctctggaggaggtcagggggacttcctggaggaggtgatatctgcactgaagcttcagtgaggataaggaatgagctgagtggggagaggggagtaagaaaggctttccaggaattgtaatttcgccagggatcagaaaaggcccaatgtgtccccaaccttccataggaggatgccactatgactatggagtccttttccctcctgtggccaggaactgcacaacgtcccttgtgcctgagcttgtttacttccacagccaagggatggcctccccagggagaatctttcccccattttgaaattcccaggagcttttgatgtgcagctaggatgaaaaagcaaccctacttgcctgggactatcctggtttgaaaactgaaagtcttgcatcccaagaagccccttagtcccaggcaaactgggacagttggttgctctatgtgtggccagggctgggggccacaccctaggcagtgttgctggggtgacagaaatggagacctaggcaaggctctagggagtccagttgtgtctgggtcactgaggaggggcagcccaccatacatgggccccaagaaagcacaataattattatatttagatctgtcagaatatagcttttctttctttctttcctttcttctctctttctttttctttctttcttctttctttctttctctctttctttcctctttctttcctttcccttccttttctttccttccctccctccctccttccttccttccctccctcccttcttcccccttttcttctttttctttctctctgtttctttctttctttctctctctctctcccttccttcctccctccctatctctctctttctttctttctttccttcttttctttctttcctttctctcctttctctttctttctttccattctctttctttctctttccttccctcccttccttctcttccttccttctttttcctttccttttctttccttttcttttctttcttgaggcagagtcttactctgtccctcaggctggagttcagtggcacaatcacagctcaccacagcctcaacctccctaggctcaagtgatcctcccacctcagcctccctagtagctgggactacaggcatgccccacctgactaatttttgtattttttgtagagacaggatttcaccatgttgcccagtctggtctcgagctcctgggctcaagcaatcctcccacctcagcctcccaaagtgctaggattacaggtgcgagctcccgcacctggccagaacaggcttttaaatttgcagctcaccttccatctcaattatctcaggccaccctcctctacaggcattgtcatcatctccccattgtacaaatggcaatgctgagaacaagagactttaaattgtttatccaaagtcataaaggtcaggtcagcctggccctaagctccttccacagaaaaagctaaatgaatgtttgttccttggtaggggtctagatcatctaatgattaggaaggagttgttatgcctgtggtatattcggtgctgtttttttttggagatggggtcttgctctgtcacccaggctagaatgcagtggtatgatcttggctcactgcaatctccacctctcggttcaagcaattttcctgcctcagcctcccgagtagctgggattacaggtgtacaccactacacctggctaatttttgtatttttagtagagacgggctttaaccatgttggccaggctggtcttgaactcctggcctcagatgttcctcccacctcagcctcccaaagtgctgggattacaggtgtaagccaccatgcccagcttataattcagtgcattttatatataatctcattaatctcaagagctactgtggaagacagacagtcatcatcttccccattttacagatgaggagacggaggcctggtgaggttaagtgacttgcccgtggtcccccagctggtcacccacaagctatcagctctccctgatcactgctcccctgtgccccagaaaaaagccagtgtctcttgttttgaacagagacaaggtgctaaatttgtccagaggtaaaaatgatgctgaaaaggggaaatgtctgaaaacaataactgagggccctttctggccttaaattattttcagctgaaaaagcccctagttcaagatcggaactgcgctctggggaacagcggccatggggtggaacagcctagagccgggtgatcagccacctggagaccggaagcccccgaggaggttctgaggaaggaaggaaggaaggaaaagactatttctggcattttctcaggcttctactgtgcccaggcaccctgtagacctcatctgtctgtcaaatcagggttcttagccactcacaaccctacagggacttcgtttgtacacagagtccttccccagttcagtccccactcacctgttcacccttatctcctacactcgctgggtgctctctccattccagccacagggcctccttgctggctttcaacctcctaggcatgcttctgcctccaggcctttgcaccggctgtgccctctgcctggaatacttctccccagatatctgcatggctcatgccttcacctcctctggtctttactcagtgaggccttttcttttctttctttccctgtttctttctttctttctttccctcctttctttctttctttccctttctttctttctttttccttttttctttttctttttttgaggtggagtctcgctctgtcacccaggctggagtgcagtggcacaatctcgactcactgcaacctcctcctcccaagtccaagtgattctcttgcctcagcctcccgagtagctgggactacaggcacatgtcaccacatctggctaattttttgtatttttagtagagacggggtttcaccgtgttagccaggatggtctcaatcttctgacctcgtgatccccccacctcggcctcccaaagtgctgggattacaggcgtgagccaccacacccggcctcagtgaggtcttttctgaccctcacagttaaaaataaaactctggccaggcgcagtggcttatgcctgtaatcccagcactttgggaggccgaggcaggtggatcacaaggccaggagtttgagaccagcctggccaacatagtgaaaccccatctctactaaatatacaaaacaaattagctgggcatggtggcaggtgcctgtagtcacagctacttgggaggctgaggcaggagaatcatttgaaaccgggaggcggaggttgcggtgagctgagatcacgccactgcagtccagcttggatgacagagtgagaccccatctcaaaaataaataaataaataaataaatagaactccattcccctcatggttaaaaaaaaaactccatccccctcaccactgtatatttccatatgattcattgtctcagacatcagcttgctttccgatttctttgattatctgtctatcttcccccctggaatgtcagcacccagaaggcagggattttcgtctgtttggcccacaactttcctccctgggcctggcacatagtaggcaagcggtcaatatttaacaacgaatgccttaatccaagaacccccataagattggggtgaaatatttgaggagatcaagacttaagggtgaagggatttgccaaggcctttagcagggagccaaatgccagatcctggagtcaaactctgatcctgtggccttttgctgaggccagtgttctcagacttcaggatttcagaggccgagaacatttcggaatgaattcgagtgaccgtgcgcggttactgttttttaatgtttatcaaggatgctcattcaaacaaacaaataacaacaaaatacccactgctggcaccataattttaccaaagaatgatcattctaatattgaaaaagttcaaaggacataattgcagaataaaagacagctctttatatggaatgcatttaaccatatttttaaactaaacggcccttcgttgtccttatttttctcatccccttgaagtctgctctaaatgttgatccaggctgtgtgaccctgtgtgagctatttgatcgcctagtgcctcagtttccctatatgtaaaatggagataagagcccatagctcagagtcttgaggagtaaatgagatctaggccgagggaagggcctagcatgcccctggcttataataaatgctcaacaaatggttccttttgttattaaaatgcaaaggcatattagtcaaccacctggtttaccactggcagtggtcgtcagctggcatttcaggaccccttccccaggctgcggcgggagaagggtatctgtggatgttgggaagagtaagaactggctccctacttagagacaaaagctggggagccccaagatgggagcccaacttacctctttttcttttctttttttgttttttttcttttttgagacagggtctcgctcttacccaggctggagtgcagtggtgtgatcatggctcactgcatcctccacctcctgggctcaagcgatgcttccacctcagcctcctaagaagctgagaccacaggacacaccaccacacttggctaattattgtgttttttgtagagactgagtctcactatgttgcccaagctggtcttgaactcctgggctcaagcagtcctcttaccttggcctcccaaaatgctggaattacagacatgagccactgttcccagcctcaactggcctcttatggggggctatgaaatctaccccaagcagaaaagattggggtcctacgtggaagggttgcagggacctaagaggctggggtggaagggaagaggaggggcctcagacaggacctgacttctgtgccttgtctctgccccaccctggggctgaatgaggggctgtgactgtgactggaggtcttacccttgctctttgcctcctaggctgggccctgtctcaggcccccaggctttccccaaactggtgcggatcctcacggccttttcctccctgcagcatctggagtgagtatagactctgggaccccttcctctcaacatctgggtgcagtgctgtgatcatagctcactgcagcctcgaattcctggcctcaagtagtcctcctgcctcagcctcctgagtagctgggaccacaggtgcatgctacagtgcccagcaacctctgggttttgacaaccccaaatcctgcccccaaggcacctgcagaaagaaaagccctcactttgtccctttttttctctcttccgcctactgcatcctcaatgtggctggcacatgagtgatgagatgacgccacatcagatgggaatccccagtgacaaaaaaagttgtagatcctttcgtgacctttgaaactcctttcctcacaacctcatttgctgctctcagcaattcagctggggagggattggggagcatagtcctactttacagtggaggttaaggaagttgccaagcctcaggggcttagttcctaagaagctaaacagggattcaagtccatcatgagttagactttgccctctggctgcctggttggagcccccaggtgatgaagtcctcgtctgaaaagctcaggaatgtgccggctgcctatggtgtattagagctggggggtgggaagggcaggtgccagggctgaggaggccctcactgggatgggaagggtcagatggccccaggacgctagctgatggcccccatctgattccacctgcagcctggatgcgctgagtgagaacaagatcggggacgagggtgtctcgcagctctcagccaccttcccccagctgaagtccttggaaaccctcaagtgagtgagctgggcctgcccttcctgctgaatcgggcccccaaagtccggctgactttttcaaaattaatttaaatttgtttttttagacaagggctcgctgtgtcacccaggctagaatatagtgctatgatcatacctctgcagccttgaactcctggcctcaaggaatctcctcacctccgcttcccaaagtgctgggattataggtgtgacttaccatgcccagccccagtggattcatccattcactcattcacctattcaatcagccattcatccttccattcaatgattcatccattcacttatgcagtcatttctttactccctcatccaaccgctcactcaatcatttctttacttacccaaccatttattaatttaatcaacaaatatttaaggaggacctactatgtgcaggcacctttctaggccctggagacccagctttaaacaaaacaaataaatcccctgacctcaggaatcttaaattctagtgaggagacacaatgaacaagtaaacaagtcggtaattataaagtatacagtaatgaaaataatgtttggtgacagaaaattatactggggggtgaaataggagagatagattaggatttatcaataaagcattattatcaaaacagtaaaactttttaaaaactgttctgggctctgggaagttggagatggataagatacaggaggatcaatgtgattttttttctttttttcagacaaggtctcgctctgtcacccagggtggagtgcagtggtgtaatcatggctcactgcagcctcaatctcctaggctcaagcaatcctcccatctcaaccttctgagtagctgggacaggtgcatgccaccacgtcccgctaatttttgtatttttttgtagagacgtggtttcaccacgttgcccaggctggtcttgaacttctgagctcaagccatcctcctgcctctgcctcccaaagtactgggattacaggcatgagtcactgtgcctggttcaatgggattttttttttttttttttgacacggagtctcgctctgtagcccaggctggagtgcagtggtacgatctatttattgcaaacttcacctcctgggttcaagcaattctcacacctcagcctcccaagtagctggaattacaggcatgcaccactacacccaactaatttttgtatttttagtagagacggggtttcaccaggttggccaggctggtcttgaactcctgacctcaagtgatccgcccacctcagcctcccaaagtgctgggattaccggcatgagccaccacgcccagttcaacatgattttttactgaacctagaggatatcaaaatcttcccacactccccctcacaaccaaggtcttaggatggccaaataatttaccggaatttacttagcaatttccttaattgtaggactgtgggacttctccagtaatttctagtgtcctaggtaacactgtaagctagatttcttctccttagtccttccgtccccctctttcttacccgccaccccacttaagtatttattgagcacctactatgtgcctggcagtgctctaggcacagggatacagtaatgagcaaaacagacacagccctgctccatgtgaagcccacaacccggcagaaaggattacacagccattaaacaaataatgccaacacttatttcattatagtgctgaaaagtggcgcagagggaaaagaggggatgttgtaaagtcatgggacaggtgggggcaggagggtgcactctccctcccatccacctcctcatccctgccctcccacttggccacaggacctaacagtatcctcctatttaccgagaggtagcttaagtctgtcgacagcgccattcacagcctatgacccagaactctccttgaggtcaaagtgaggcatgcaagtttggtcctgagccctccccctcactgtgtccccgcagtctgtcccagaacaacatcactgacctgggtgcctacaaactcgccgaggccctgccttcgctcgctgcatccctgctcaggctaaggtgagtggggccccggataccggtcaggtgctgagctggggggctgcagagcgcagggaacccacatcgtgctggctgcaggggacactgagaccctagaagcaatcaccacagccctgaacaaaaggattagcgggacgtggtgaaagaaactctgagcaagtcagttattcattcctagccgctgttttcttacctggaaaatgggaaccatcctaatggtctatgtaagcacttgtcacaatgccaggttctgttatgcaataaatattgctccttttcccccagggatggcgggaccaggctttttccggaacctaggggtggtggcttctggaaggctaaccacgtacgtcagcttttgccggccttgtcacttacatgccggtcagtgtttcactgccaccttctggtaggccttggcatagcacctcttgcttttgagtgacttccatccaggccctggtgtggtcccagaggtaatgagcggactgagcttggaccagagccccagtcatccaactcagcattaccagctcttcttactcgccagactgagagaaactgctctcctcttcgccagagctcttcacttactgaggacaaccagagtcagattcccaggaaagatggcatttggtcccttattatttatttatttttaatttttttaatttctgtttttgagatggagtctcgctctgtcacccaggctggagtgaagtggtgtgatctcagctcactgcaacttctgcccccccccaggttcaagctattcgcctgcctcagtgctccgagtagctgggattataggcgcccaccaccacgtccagctagtttttatatttttagtagagacagggtttcgccatgttggccaggctggtctcaaactcctgatctcaggtgatccacctgcctcggcctcccaaagtgagtactaggattacaggcgtgagccaccatgcccggccaacttatttatttatttatttatttatttatttggagatggggtctcacccaggttgtagtgcaggggtgcaatgatggctcactacagcctcgactacctggactgaagcgaacctcccacctcagccttccaagtagctgggtcctataccctcctgagccttgttaatttcttcccagcatgatcactgttttacaatattttatttatgtaggtgcttacttcttgctatgcaaagaaactcagaagcaaaaatagaatctgtctggttcataattgtgctaaaaactagagatacaagtatgaactagacagatgtcgttcttgcttttgagtttctttgcgtagtaggaattaggcacatacataaataaaatattgtaaaacagtgattcatgctgggaaggaaactaacaagccccaggagggtacaggacttctggggagatgattcttccgtgggaagctctaggggaaaaggactctaggaagaaagaacagcaggtgcaaaggccctaagtgggaaaaggggctgtgttttaagggtcagaagggccactgtggctgtgtgtagtgaatgagggacagaggctgggcaatggtggaagtaggggaggtcaggggaatccagatcacacagggaggcccttgtgggtcacaagaggtatttgcagtttttcagtgtgaatggaaaagtaggtgggcctgggaaggcgacacttgatctgatttacacttttcttttttcttttcttttctttttgagaccaagtctcactttattgcccaggctaaggtgcagtggcatgatctcagctcactgcaagcactgcctcctgggttcaagtgattctcatgcctcagcctcccaagtagctgggattacagatgcccgccaccacaccaggctatttttgtgttttcagtagagacagggcttcgccatgtggcccagactggtcttgaaatcctgggcccaagcgatccacccacctcagccttccaaagtgctgggattacgggtgtgagccaccatgcccagcctgatttaccctttaagaaacatcatatttcatggaatctaagatgccatccattgtaagaccccaatatgaggccaaaatgcaaactgtgacacgctattggttataagacacatcctgatctcaatgatattcaaatggtgacatatatgtcttggcatcgatgaaatatggtcagattactctccctgtggggtggaggaagggtctccagggttcagagattgcaaaacccccatctagtttctgcactggtaccggccgacccgtgatgtgagttgatttagcctgaatccacttggcagcagtgtaaacctgctgcatttatttatttttttctttttttttcgagacagagtttcgctcttgttgccaaggctggagtgcagtctcagttcactgcaactccgcctcccgagttcaagcaattctcctgcctcagcctctcaagtagctgggagtataggcatgtgccatcacacccggctaattttgtatttttagtagagacggggtttctccatgttggtcaggctggtctcaaactcccgaccttaggtgatccacccgcctcggcctccaaagtgttaggattacaggcgtgagccactgcacctgctgcttttatatgcagccctgcaagggagttctgaggctgaatcatggcaaagtcatggccctgaaatcatacccgcagcagcacctgacctgttaaaaggctgcttggtgtcgagtaaacagctgaagttggcatcagtgacactcatcatgctattttcactgctactaatgctggttgtgaatatgctgcagaaactggagctggtccagtgactggctttttctcttcctgcccccagtgctggtcacaccctctatgttaactcatgcgaccctcaccaatgttcctgtgatgtagtcagaaccatagctaacatttagttcattctaggcaccaaggcatgttctaaatgttatatcagcattgattcatttactcctccccacaatgactctatcatgcccattttacagatgggcaaactgagtctcagaagagttgagtagcttgcccaaggtcacataggcagtaagaggcatagctgggatttgaacttgggaagttgttctgacagtttccacacagtaaggcaagaaatgacttccttttagtcctgctgttttcctgggctcactgtttgaccacagagaagtggtctcaactctctgggtcttggtttgcctgtctttaaaatggggcagtaatcccagtaggtggtgactcccacggggctgacctccaggctgcaggggacactgagatcctagaagcaatcaccacagccctgaacaagagaactagtgggacctggggacagaaactttgagcaagtcacttattcattcctagcctctattttcatatctagaaaatgggaaccatcccaatggcctatgtaagtacttggcacaatgccaggctctgttgtgcaataaatattgattccttcccccagggatagtgggaccaggctttttctggaatctagggatggtggcttctggaaggctgaccatgcacaggcctccaatccctccccctggcctctgtttccgacagcttgtacaataactgcatctgcgacgtgggagccgagagcttggctcgtgtgcttccggacatggtgtccctccgggtgatggagtgagtgtgggagtctgggcggtgggtggctcagcccggggtgggagacactgaagtctctccctggtgtcctggaagagctggatgtgggggtggccttggtctggagctggggagtcccaagggccaggccccaaggtgagtttctcttgccagcgtccagtacaacaagttcacggctgccggggcccagcagctcgctgccagccttcggaggtgtcctcatgtggagacgctggcgtaagtccaggcaaccctggtgggtggagaacaactcactccccaggcgtgtggcccagtgtgaccccggagctcaaatcatgctcttcccttcaccaatctgcaaccctgggtgagcagacacttccccctctggcttcagcttcttcatctgtaaagtggggacagtaataatatccacccaagaggttttgtgaggcttaaactaatcaagccctacaaagctcttataacaacagtagctggcacacaaaaatgccaataaatgctatattaggctgaaccatatgaaattgctgacatccacccatttttgacctgtaaaattggcaatttcatatggttcaggtttatcttttattaagtcaccatgatgtccaatactggttactttatattctttcaaagcacttttatctccacaatcactcacctcttctaagacgcacagggtgggtcttacaagacccattttacagatgaggaaaataaagcacagagcagttaactaacctttctggggtcacacagcaagtcagctgcagaaccataaaggaatctcgggcctcctaggcttctccttttccccatgacccacaccggtcggtatcttgccaggggaaaagtccccaacgttctaggctgggtggaaggagggatttgggggcagctgtcactggggccccaggccgccctctctcctctaacctggctctgagtcccatccccccttgcaggatgtggacgcccaccatcccattcagtgtccaggaacacctgcaacaacaggattcacggatcagcctgagatgatcccagctgtgctctggacagggtaaccagggtgggcttgggaggggagagccgcagtgggttgggggcagtgtccttgtgaaggtggcattcaaaaaatgtgggcgggacacaggtggggctaggccaccacccttggacgcatgcgtcatcagagacatcccctcatctccaccctgggctcggtggagctgtcctccaggctttgcgagcttggtccctgtggtcaggcttagagatcaggggacaggaaagttggccatccacatcccacagcctcagtgcttggaagagcttcctttggggactccaagccttcccagctgctgtttcggcttggtggctgccctgatgctccgggtttgtctcagatgaacttgcttgacaagtctcctgctcctcactatgaagatcactgtcccccagccctgtgctccccgcactgtgctgcacgtccacctccattccactgcccctcccatccccccatcttgatagcacccttcccaggtgtcaagctgcccctcctagagtgtcctgcctaaaccccctctcctggctcctcccgctacagcatgttctctgaggacactaaccacgctggaccttgaactgggtacttgtggacacagctcttctccaggctgtatcccatgagcctcagcatcctggcacccggcccctgctggttcagggttggcccctgcccggctgcggaatgaaccacatcttgctctgctgacagacacaggcccggctccaggctcctttagcgcccagttgggtggatgcctggtggcagctgcggtccacccaggagccccgaggccttctctgaaggacattgcggacagccacggccaggccagagggagtgacagaggcagccccattctgcctgcccaggcccctgccaccctggggagaaagtacttctttttttttatttttagacagagtctcactgttgcccaggctggcgtgcagtggtgcgatctgggttcactgcaacctccgcctcttgggttcaagcgattcttctgcttcagcctcccgagtagctgggactacaggcacccaccatcatgtctggctaatttttcatttttagtagagacagggttttgccatgttggccaggctggtctcaaactcttgacctcaggtgatccacccacctcagcctcccaaagtgctgggattacaagcgtgagccactgcaccgggccacagagaaagtacttctccaccctgctctccgaccagacaccttgacagggcacaccgggcactcagaagacactgatgggcaacccccagcctgctaattccccagattgcaacaggctgggcttcagtggcagctgcttttgtctatgggactcaatgcactgacattgttggccaaagccaaagctaggcctggccagatgcaccagcccttagcagggaaacagctaatgggacactaatggggcggtgagaggggaacagactggaagcacagcttcatttcctgtgtcttttttcactacattataaatgtctctttaatgtcacaggcaggtccagggtttgagttcataccctgttaccattttggggtacccactgctctggttatctaatatgtaacaagccaccccaaatcatagtggcttaaaacaacactcacatttattctgctcacatatctgtcatttgagcagggctcagcggggacagctccttctgtcctactctgtgtcaggtggggcagcttgagggttgggctggtgtcacctgaagactcattcttctgtacgtctgacaggcaatgctggctgttggctgggggcctcagtgccactacggaatagttggctaggacccctccatgtgggctagttgggcttcctcatagtatggtggctgggttggagggtgtcccaaaaagaaaggaggggatagagagagaccacttttcataacctagccttagaagtcacacagtattacttctgctacatatatatgttttaagaggcagggtctcactctgtcgcccagtctggaatgcagtggtatgatcacggctcactgcagcctcaacctcctgggctaagtgatcctcccacctcagcctcccgaatagctgggactacaggtgtgagtcaccaagcccagttaatctttagttttatttttgtagagccagggtctcactatgttgcccaggcaggtcttgaactcctggcctcaagtgattctcctgcctcagcctcccaaagtgctgggattacaggtgtgaaccaccacacccagcccacttctgccatattctgttggccagtgtgacaaggattgctactgtcctacccaccctcctttcaccacatgtgcacatgcacgtgtgtgcacgtacacacacatacacacacacgcgtgcacacaccagagcccaccttggctcaagtcctcttttctgagaggacttttctttgtggcttcctaaaattcagtggaaaattaattgtttggggatgagaaaggttgaagcaccaaaagcttaccaaggggaatgtttgcctctgcctctgacacacagctctgtcctgggagtgagctggtttttagcggagacggagtcccaccttggctgcagggagtccgaaagggacttggaagctccgctttctacccagcgagctgccggcacgactgttgcttttcactcgggcatagtctgctcagaagccccaattcaagacatcttagcttactcctggtggcagtgggagctgcctgttcagctccagctcaccagccccagtgcccacaggatcagtctgattcccaagctctgctcctctccccagcaagtgagagctgggtgtcaagagggtctgaggaatccagacccggctgcgtggttgatgatctttgcagacaggcaagcacctcctgcctcgaactggctgcaaagggtatcaggtgctgccatccaggttcagcttgtaaatagctcaggtgtcaccctgcaagggatccctgcacttgcagactctacagaggccatgggcctcctgtgtgtgcgcctacaggagtgagcactaaggtgtgctctgatcatccactgtgccatgtgccaggtttttggtctgacccactgcttttggtctgtgtgatgatgaaatgaggtcagagcctgcagttattaacactaacgatttgttaatgatagctactgtttattattttatttaatttttttgagacagagttttcactcttattgcccacgctggagtgcagtggcatgatctcggctcactgcaacctctgcctcctgggttcaagcaattctcccacctcagcctcccaagtagctgggattacaggcatgcaccaccacgcctggctaatttttgtatttttagtagagatggagtttcaccatgttggccaggctggtaatctgcctgccttggcctcccaaagtgctgggattacaggggtgagccaccgcacccggccactactgtttatttaatgagcagatacatgcaaagcccttatcacagtgcaagggaaattcaaagcgctcagaaagtattagctcaataagtgatgactgtgtgccagacactgtgctaaactcctactcaagagggataagagtctaggggcaagtggcagagactctagaacgagattgcctgggctcaacgcccacctcaccacttacttatgcaagctagttctctgtgcctcagtctcctcatttgtaaaatgggcataaccacagcaccttctttataggattatgtgaaggtgtggtgagctaatacgttaagaattggagctcaataacatgttggctgtcattattacatatatctgtgtttcattcttgcctctggctggaatgttcttcccagctctccatatggctgatttctcatccttcgggacttgccccattctccaaccccatcactagttttatctttttcacttatttatgcagtctgctcttgtcctaggacatgagctccaggagggcgggaaacatctcgctttgtacactgctgtgccctctgtacccagcaaggcgcctgtgtataataggtgctcaataacataaaatgaacaaataatcctcacctaacggtttcattcattctgcaaatacatactgacagcacagtcatgaataagatgttcctgccctggtgagtcttatattttagcaaattaaaaaaactctttggacagggctgccaggtgaggttggccagtctgtacactgcacaaaggcacctgggacaagggggaacatgggggctgcaaaccagtctgggttctgcttgccaaactgggagtcctggtgtggagccttttaacccagaggggcatcttttcgtagttaacgcacagtcatcgtaagatgtggataaattactgtctccgtgtcacagatctaagtgatacttatagtcacactcctataaaggaatggacttctgacttctttggaggacctctctgcagggacaggcacagtgtgccggaagtgcccctgaaccccatttgtcaggtggtaaagcgctgctcggaggaatcagggcatgatagtgcaattccatgtccagtggattgtaagtccacgcaccttccaaatggtcactcttcctcgcaggcctctctctgcatacaaatgtctccctcctgacgctcacctttttccctggggctctcaaatgtcttcttttcagatttcgtagcttttctttctttagcatcacttgagggcaagtggtgctccaactgtctccccccagagttctgccgcctgtactctcccacacctcagtctcctcgcctgtagaaaggggtcaatcgtttgaaccctgcttcacttggtgtgtatgtgaaggtgctttgaaatcaagtgctctgcaaactggagagaattactgcttgtattccgtgaaactacaagctcccaattccactcatttaatccctctcttgctctgttgcccaggctggaatgcagtggcatgatctcaactcactgcaacctctgcctccctggtttcaagcaattctcctgcctcagcctcccgagtagctgggactataagtgtgcgccactatgcctggctaatttttttgtatttttagtagagatggggtttcaccgtggtggccaggctggtctcgaactcctaacctcaagtgatctgcccgcctcggccttccaaagtgctgggattacaggcatgagccaccatgccaagcccttcccccctatctttaatgaaggtctaccatgtgcctgacacaggggatacccacccccacttctatgggattcaggcctggtttccagcttggccttcaggcttttcccaccacaccccaaatgctgtccctggcttgtggagtggggcagggggccagcctgggactttcacgccagcccgactggggcagactctctcaaccccactggatcttctgctgtttgtcagccacaaggttctgcctagaactcctttcccgaatctcaaagttaaaaaaaaaggcagggccccaggggttggagttgcatacatttttttttaatccaaagaagtaagcctcctaagtattgcttagacaggtttatcagaattaagtaggcacaacactcatactttcagaaaagcatttccagccaggggagtaacgtggcactcaccagcatgatgtctgttttgccaacttgctgaagaacgagtaacctgaaatgaaggagcgagaatcccaccctcagccccccaacagcttcctcagcttctttttcttctgagtcacccctgaaacagtcgctgcatctaagaccagcctcgggctaaacccagctggcctgaaggctcaactcacatcaaacggagctgggagtcgcttttgcgtgtgtccgcagtttgaagtgtcctctccgaaggtgaagtgggggaagcaggtgcgctccgggatgaagtgcagggaggcaaactctggctgggttcctgtaaacatccatcgcagctgcaaataatcagaagccaaggccaggccatcgatttgacactgcaggcagatgaggtcttgggatgcctcttgcgttcccccttctgtgggagcaggtgccttcccaacctcagcactcagtcccaatctctcttccactctcctgggttcaaacaggaacctctctgttggcacgaagcttttgaggggagcaggtctaacaagaaggaaaaaggggggttattagcacggaagccccaccctgccaccaggttggctggggacagggaccaatccaccaggctcgggaggcttggggtggggcagggaagtcttcctccatccctcaaatttagggaaccactgggagccccagactcaggctgaaaatgtctttctgcaaatataaaactctttttaatgaatttgcctaatttctcagagaccctgggctggagaaccagtgcaatgtcacacgggagaggaaggactgtcctgtttattgggagggaggagggggatgctggtgcagcctgctcaggagtcacccagggtctgagggctgacttgcagctctgggccagctgagccagcgctgggtagtgggcagggcttggcaacaccttccaccttgcccggaaaaatgctttgcaacctacaggaaggcaatagccacagccaagttactcagcagccccacttggctctttctcccaggatgcagcatcatctccatggcctggccccctggcacgtccccgtttcccactgccttctctgtgtgcctagccgggtgccagtgtctctgtagcacctcgtgttcccatgcccaacccctctgcagccccctcaagccctgctctgattccaagcctcatctcccagctcactatcctttccgcaaacttcactgaacatctcgcagaacttgtatgttaaacatgtgacatgtattgttgtttgacagggtgctattgacatttggggtaggacaattcttggaggtggggtggctgttctgggcactgagcatttagcagcatctctggctccaggccactaaatgccagtagcacccctggccactggaacaactaaaaatgccctcctaccctatttccaaggtcgacctaagggggcggaactgtttccattgagacccatgcatcgtataggataagaaactgaggttcttatcatttaataggataagaaattgaggttcagagaagccaagtaacctgcctaaagatgcacagctatgagaggcaaagctggcactggcttggtaataacgatggaaacggtctgaatgagagcaggtaccatttcctgagctcttagcagacgctgaggaccctgctaagtgccatgagaccttagcagaggctgtgggtgccccgccccattccctccactcactcttccttgcaggtcgacctgcccttctttgctgaggcctttctctgcctccagagcctgcttggtcctcaggctgtaagtgcaggcagagctaatgtctctccatagctgccctccaccagcctgctcctgagacacctgctggccagcagcctgaagcagaatcctttactcagattcagccgcacagatgctcactgcagagatctccaaggcctgtggtcatccttgagcccatctcagatttgtgtggatagggtgttagagaacatggaatcagctggatagagtggttcatgcttgtaatcccagcactttgggaggctggggtgggaggatcacttgaggccaggagtttgagaccagcctgggcaacacagtgagactgtctctataaaaaatttaaaaattagccaggcatagtgtagtctcagctacttggaaggctgaggcaggaggattgcgtgagcccagcagttcaaggctgcagtgaactatgactgtgcccctgcacccagcctgggtgacagagaccctgtctcaaaaaaaagagaagatggaatcactcggtgaggacctcactcctctcccagtcctgtgaccacaaaccgcatccccgacagtcccagccaggcgctagtctggctgtagctgccctcttgtgtgcagatctccagtctgaatgggctacacgtggaatttactaacactccggttttcattgtgtttatctgtagggttaccttctatttatagcaagtgatgccaagtttccatttctggtagtaatatagtttttcttttccaagtcgctcacacctgtaatcccaacactttgggaggctaaggtgggtggatcagttgagatcaggagtttgagaccagcctggccaacatggcgaaatgaggtcaagactagcctggccaacatggcgaaaccgcgtctctactaaaaacaaacaaacaaaaatacaaaattcgctgggcatggtggcaggtgcctgaggtcccagctactcgggaggctgaggcagaagaatcgcttgagctagggaggcagaggttgcagtgagccgagatcacgccactgcactatagcctaggtgacagagtgagactctgtctcaaaaaaacacaaaagtttctcttttcaaaacattttactttaaaaggagccaatttaaagaaaactgttaatagttcaggtaacaggcagatacaggaaaagctgctgacagtgttgtatgaggtttgaggattttgatccaagctggtcccactcagtccatagcagagaatgaaagggcccagagagggtggtgacctctgcctgaagtcacacagtgagtcgaggacagggaggtgaccccaggtttctatgtgtagggcgggaggatgttctgggacacagttcaattctcatttgtcacacactttggctattagagatcaaccccttcgctcctgtgtcttgcaatggcagccttggcaaacgctaaatgaaaatcgtgacaacacttgtgttatgaagcatttactttgtgttcaccttgtactactcgaactcatgtcttaactcacttatccctcaaaaacaactctaggaggtagggccaagtaggaccatcatccctgcatttcacatggagctcagagaggttaagcaagccgtgcaaggccacacagctcataaatggcagagccaggatttgaacccccgtggcctgaccccaaagccgaaaccactcggcactgcaggttcgtcccttttctctgagatgggggtatccaatcttttggcttccctgggccacagtggaagaactgtctggggccacatataaaatatactaatgatagctcatgagctaaaaaataaaacaaaatcacacacacacacacaaaaaaacacaaaccaaaaaaaaaattctttttttttttttttttttgagacagggtcttgctttgtcacccaggctggagggcagtggcatgatcttggctcactgcagttccaggttcaagcaattctcatgcctcagcctcctgagtagctgggactacaggcgcatgtcaccatgcctggctaattgatgtattttttagtagagatggggtttcaccatgttggccaggctaaaatctcataacgttttaagaaagtttatgaatctgtgttgggccacagtcaaagccgtcctgagctgtatgcagcctacaggccgcaccacggattgaacaagtttcttctaaggcatcaagagccccaggctgaaaagcaccccagagctggagcttatagaacccagggcagcaggttctccaaccttctgacatcatcagagcacagcagacaagttatcagccactagatttttttccccctttctgaaactgtaacctttcattccagccattccccagagctggacagaggacgtggctggctggctggtttctgtagtcagaatgacagttgggtgctagatccccttcgtgaagcaatgtcttagctcagtaactctgcagagaagctgcctggttcaggatgtggcttaagtaagaagatggccctggcgttttacgcgcactggtgggtgaggctctgaaagtggtagaagggaattctttcctagagttcagctgcccgctgtcctgctcctcagggcaaatgctgtgagatctgcatttagcctgtctgtgctgattgtggttctgccccttcctggctgtgtgacctcagacaagtcacccaccctctctgggccagtttcctcatctggaaaaggggacagtgcccaccacattgggctgtttgtgtccatggagtgcctgacaatacccagcacacacgagacatcagtacagggtggttccttccctccttagccccacctgttcccaggtagaaaccaataccggcagggaaccttctcaaggctaggggccttctgaaagcagcagcacttttcctccttcaaagaccttgccttctagaaacccattgctcattcctttctccatgtaccaaaaaatcaattaaagtggctaaagacagacgtcaccctcccctactcacgcagccattctgatcctccacgctggtgacaggctatgtggcaggagggtctctaccttatctcagaatgaaggcatggctggggtctggctgtctcctggtggccggaaggagacagacggcaaaggagaagctgcctgtctctgcacaggtccatgtccctgaggaaagccaacgtcacagagaaatgatgaccactttctcaaacctggcttcggatttgcacgttggctgccaaagctgatcagcagcgggctttgtgaagatgcctggtctaccacgtgcctccagctggtcacgcccaagactccctgagccctctggaagggcagcacttgcccagtgcctccctccaggtcctgccacatccaagaaccacctggactattatttacttagtattttaaaccaatgtactttttaaactccaattttttaataagatcatttatgtcaccatataacacccaaagcagtagaatttgtcatacacagaaggcaatgctaaaaatacaatgaaaatggaaccaggaagtctagcttgatacccttggcctgtataactgagccttgtgccagttaaaagggcaaagcagtaggtgctcagggggtgtcggggccctgagagctgatctgatccgctgctgcgtattcactaccgccctgggacgcctccagcagaccacctcactgggggaaacatcaggacagcgtggccaggagcccaatgctgccacctcatagatgggtatctgagatgagtcatcgaacttctgcaagcctcagtttcctccctggtctaatggaaccctccttggcggcttcacagggtgatgcttggggcaggtgatggagatgtgggagaggcagttatttttaaccacccagccaagccccttgccaggagggactcccagaaatgaagccttacccttgagggagttccccgccactccaagcttggggcctgggatggcagctgtgagggcaccagcaccatctggggactcgctgggtaccaattatcaccgcccttgggctacttcaaaggctgcccacacagacacaccctccttggtaaccagtcctcaggaggaagggcacccaaggaaagggggaaggcttcctgggctagagccccttcagggtctgacacgccattgacactgaccacgtcattcattaagcaagcaccaactatacatcattcactatcccaatctaatttgcacaagcccttaggcaggtgctactattatccctgttttacagagaaggaaaccgaggcttaggagatgaagtctgaggtgttggtggagctgggatttaaaccaaaatatgtccaactgcaaagcatgtaagtaacaattttagagggtatacggaggtgaccctaagtaacaaggaatcacatatagtgagcaagcaatttgcttttcagtttttggtcaatccttatgattatttagaggagaaagttcagtttggtgctggtatatcttatgtttatcacccgacagttgttaatctctttttaacaaagaatacaggccaaggccctgtgactttagctggctttggtatttggccaaaagttaatgactttggcagttagtgtttttatccatgccaagcgatgatgattttctctttagtgacagacattttttaaaaaataaattcacataaaaaagtagttttacagatgaagcactaaaactagtgcatttcatcttaaactgcaaattataaagggaataatagtaacttgacagtggagagacctggcagacaccaccttcaccaactgatcaaagttaacatcgccagaaaggggacagatggcatgtgcctctcgataagatgcactgaagacacacactcacttctgcaatattcctgccaagaatgcctcatctgaatctaatctcgagtataaccatcagacaaacccaaattgagagacagtttacaaaacaccagccttgtactctgcttaatatgtcaatgtcacaagagagaaagacagactgaagagctgatccagactgaagaaggctcgagattaatgcaaaagctgatctgggattgcatcttggacctcaactctcccctttttattgttaagggacactactgggacaattttttttttttttcgttttgagacagggtctcgctcagtcacccaggctggagtgcagtggtggaataataactcactgcagccttgaactcccggactcaagcaatcctcctgcctgagccttccgagtaactgggactatgggcgtgtaccacaacacctcgctattttttttttcctactttttgtagagacggggtctcactatgttgcccaggctggtttcaaactcaagtgatccttccacctcagcctctataaaatttgaataaagttgtagatgagattggtcataggattgtatagtgtatcaatattagatttgctgattttgacaaccctactgtggttatgcaaatttgtccttgttctaaggaaataaatactgaattatttaggagtaaaggtgcataatgaacccattttcaaatgcttatgaaaattacacatatacacatgtgtgcatatacacaggcatgcatatacaaacagagggaagagcatgcacgtgtacatgagcaaagtgctaactggtgcaactggtgagtttgggcgggcattgtttgtgctcttgcaacttttctgtaagtgtgaaattacttcataacagaggtttttgtttgtttgtttgtttttaattcaggaaaaagttggaagagtgcgtatgaaataggcctggcagaaactatgagctggtgttccaaggtcggggatggggagccctcactggaggcacccctcaaaccctcagtgctgtggccagggaaccgggctggcagtcttagttggctttgttccctcggcctccacttccccattctgtgcctccatttatttgtgagacagggataaagaggtctgccacttttattgtgatcttaggtttcccaaaagccgagtatgctttcagaagttctgggaggaaagctagcagataaaccagaaatatgaatatccaaattgagagaagccctcactttcttagttcggcaaaacagacacatgagctgtaagtggggcagaccctgcctgtttcttggctgaaatctccagtttgtataattcagggctaagagagcaggactcttgacatctcactgtcttgagacacatactggggttttctcctgtctgaagacgcagctggcaccaatgtaccctatggccaaggaccttctgggtgagcctcatgtcaggagcagagctggagaggtggccaggcctgggggtatacttgcctccctgtgtcaccattgtctgtctcttgcttagatgacagccacagcttcctggcctggtttcctgcatccgccctgacccctggctgtgggatctcccataactcaaatctgactgtgtccctgtggaaggtttgggtttctgacctgggcagctctatgtccggcacaggggttctgctgatagcacaggccacagattggcaaggagggaccaggttaggaaggagcagctgtggttcctagttgggagataactgaagcctaggaaatcctggaataagatagaccaatgcatcgataaccctcagctccaaatctgagctgcaccaggacaagctgactctggtggcaacgttctccagtctctgcattttcagctcgctgtgtgccaagagagggctggcaggtaccagcagctttcactttcattaggaaccgggacgaataatccaactgagctgcctctgcaccagaactgctgggacgtgaagactctccctggctcccaggccagccactgcagccctttctcctgggaaggagggagctcccgattccccattccctgctcctgggcaacaattaacactctaggaaaaccacagagccggctatccagggttctggtgccctggggaccacagggcagcaagaaagttctcctaagggtcctggggctgggaaggcagagtgggaagtctcccccagctaggctagacctggacctccctggcactcaggcagcctgtcctcttctgctcacaggatataaatattcatgcatgagtataggtgcaggtttgtacatttgcaagggcatgggtataacacgctttccattgtatccgactatgaatatgagtggttaatattaatacatctcttactatatacaaggagatctaagtgctttatgtatatctcacctaatcctcacaacaagggagattttcattatttccatcttctagaagaggaaaccaaagtacagggaggttaagcagcatgcccaaggtcacagctaccctgggatgtgaacccagggccctggctcttaaccatgaccctaatactgcctcctcaagtaggtgctcagcaaatgtttgaggaactgaattatgtgggtccacacataagagaaaaaaaaaaaaaagagggagcaaaagtaggtgcacctgttcatcttgagattcatcctgggccccactgtgtgacatgctccacgcccttagtcactgtttcctggattggcgtgtggggaacacatgtgaccacatgagaatggctgagaaagagcaggactgactaccggcgttcccctgcttatggaaaggggcctggagatgaggctcggtcagatcatcttgaggtctttcctggcggcttccctgctgctagctacccctctcataccctggggttctgagcttcctcggcacttgggggcaaggcctccttggcttggatttgagggtggggaggagggaaggctgtgcatggcttccaccacttctccaggcctccccacttcccagggtcaggccctgacaccccgagagctttgcaagggtgtccctgagagatatttcctggtgtttctgcttaaacagcgtttgctgcaaaatatgtcgaagcatttgggattcagtttttagttcagaatatgccaatgttttcatttggaaggggaagtgtttctgttgatgtggtaaagagataaaataagacgttcctcaccaagttacactgcttcaaagtcaaatgcttggcttggagacagggatttatcttgggatcgcaggcccttagcacacggcctggcagaagagcaggcagggtcaaagtctgttgaatgagtgagtgcatatgcaaagggcctagacacaggagtgcgatacaatcaatgctcagtacagattttgaatggattccataggttctacttttgagagttgttctcagtctgttcatgtttctctatcttcactaaactcccctcatccaagcctctgtcacctctggcctggacaactaacagcatctgaggtggtggccctgcttcccctcttacccctcagctcattctgtccacaattgccagagtcatttttgcaaaatgggaatgggattgtgtcatctcctgcctagaaccttccaatggctttccactgctcttggctatggccttccaggtcctccatggtatggctcccacccacctcactgacctttcctggggctgttctccagccacatgggcctccttttggttgcggaaaaaccaactctctctcacctgaaggtcttggcaccactgattccctcagcctggactgcttttctccagatccttctatcaaattaaggctcagctcaaaagcatcatctccttagagaggctttctctgacccctcagctaaagcagcccaccatctctatcctaccgtttcacttctgtttcactccatgtctacacctacagagaccgtctactagaggccaggcacagttttaagtgttgaggacatggcagtgaacacaacagggaagctcatgtccttcttgcctgccttcatagttccgaaaaaatctgattctcttgtttgggttcctactagtcttcctcaccaagtgccaaagggccaaggcttggtctgtcttgttcactgtgttcaatcaccaggcactgtactgaaccaacaagcattcattctgtaaaagaacggacggatggatggcaggcaggcaggcaggctggggaggtgtgcagagcacctggcacacactccccctggcacttggttctcgctaagatgttactgagctcaactgaagctttttcttcaaagaaatctcactgtgaacccattaggagagccctctgccgccagctatgctgtcagtaggtcctaccccaccctgtaccaccatctgcaacagactcaatgtttgtgtctcctcaaacttcatatgttgaaactctgatcccaaatgatggtattgcggggtgcggccttagggaggtgattaggtcacgaaggcagagccttcatgggtgggattaatgcccttataagaacagtaagagataaatgtttaagtcccccagcctatggtgttctgttatagcagactgaactaagacaccctctgcctgtggttgtcttggcaaagccaggtaatgcaggagaggggtggactcagcctgcttgcggtgaatggcattagtgtccattttcctaaaggagcccttgcccaccatatctcagcatcccctcttcattgccacttagaccctgtgcccagtgacactccagtactgtccagtctcaggggctgagccaaggcgttcctgcctgccctgtgaccctcaccagacctggcagctgcctgacagcttgtctggctcacgtgttctctctaattgagtctagctgcctctcttccttgtgactatgaccaagtcttactccttcctggaccttcatttccctacctctcacatacacagtgggctggatgctggatgcaaagctccctcgtcacagccccaaagacaggacttgaccatctcagtgcaatgaccctgtggtgccttctcccgaggacctaagagccccctgagcgcttgcaaacactgcagacaaagcgagccctggcaccagctccctgcctgcctgttctgtgaagggagcctacaaaactggcagcccctgcagttctgagctgcagaactgatgagctggggcaccctgaaacctgactccaaaatagcagcaaacccaaggccaaaaggaagtacgggcttctttgcttgcgatttctcctctcacagctttggcctagagcccctgcacttaatccccacccagctaccccaagggccacagtacaaaggtgattcgtgcctggctccctgtgtcttctgacacccctaaatctttatccttctaggacaagcgagaatcccccaaaagccaaggtcatcatcaagccaggatgaggactggaggaggagctgacagctctgcctcaaatggatttgggagcgaaggctttttccataagctttgggggtaagtcacagagctaccccaaatgtaacttagtctcggggtctccttccttttcaccagctgtcccctttgctggaggaagctttccagcccaaacgaagggcttaagaggagtctggccattcctggcatccagttagacctggaggaggtgaacggaggagaagcctgagggaggggtgtgtatccggcctgggaattcctccctctcccttgctagcgccccaacccgccctcatcctgttcagagagggcacttacaggcctcggaggcaggggagggtctcctcctggggaaccatccccgtccagatggtgcccccaaccagctgcggcggcatgatctgggcggctggtccagggcatgggttgcggatcgtgtagggaagaggggaacagcagtcgagaccctactccaagtacgcatcaaagacgtcgagctccgagtcagcatcgtaaaggcccgagccggggtcggagagcacgccgaggtccacgagcgcctggtccatgtcctcgggcaggaagacgaggcccacgttgaggacgatgtactccatgaggaaggcgtagtacaggatcagcacattgacgaagaacaggcccacgtagaacatagagggcagcagcggcggcggcacgtaggggaccagggggcccagtgcgtccaggtgggccgcgacccgggcgccgagcatgcagcgggtggcaagggcggcggcccggcgatcccggcgaactcagccgctgcggcgcccgggcggccggcgagggcacagcgcagccatccaggggtaccctggagcccgacagaagcagggccgggctccagatgtcccctggcaattgcgccccgacccccgaaatgcgccgggcgggtcaccgcaccccgagatgtgcccccaaggatctctcgaccgcccgggcggcgaggcgggcccccctgaagtggcccgcggctgcccggctccctcgtggcgcctccctggcgctcgcagggcctcgcagagccggtggggatcccaccgcggctcagtgtctagggccggtcccggcagccttctctcccgccccgccccgcaggtcctcgcgcaccccccgcgcccccgcaggcccagcacccatggctgcggccgccgcgtagccctcccggtggcgctcggagctccgcctcccgaggggccccgagctcattggcaggccgccccctgcacgcgctaattggccggctcaacgcccgcgctgattggctccggccgccagggggcgggtaccgcttcgctccgcccctcggggccctagcgtctgagttgctttcctggttcgggtctgccctcagatctcaaatcgaattcgctctgcgtatcgaatagggggaggtaaaagagactgaacacagttcaaacctagacataatgctaaggccgcaaaagccgaaggaaacccgggctaccgctgcaccttgctgcatgcctctttgggactccgtttctcctttaaaaggaggcggggtcggggaggggcgacggacggttgccctggaaattttggacattcccaaagcgccaattttcatggtggagatccaccagtgtccccttcgcttctccaaactctggttgctggaaggtccgcccactacggaacctgcatcctagagttaaggaacacctgaataaagagattccgaggtagttcagatcttcaaccataaggatgctttttgtttctttttactttgtgaatcatgtttaaaagcaataatacacatggctaaacattcaaacaaccgtgaagtacacagaaaagtgagtctctcccacccactggttcccctgctcttgggtaaccgttgcatgtctttcaggaaaacatgatctcgcccaaagagccttccaaagcagttcaagaaacctttaaatctcaggccacactgagctgagtattttacatgcatcgcttaatcggaggtatacaaggcagtgtagtatgtatgtgcgtactttttacagatgaaaaatacgagcccagggatcctacatttctgagcctgggtgtgtttctttggaggccagatcctgttcttttttgctccatgactttgtcttgccccactctatatgaattacaggacaaaccattaactctccactcttatccatttctccaactgctgaaggtgaaacaaacctttactcattcatgcactctaccaatatttgttaaacacctgctatgtgccaaaccttgtgctaggcactggggagaacattggcctctggcccagttctttcttgagcagagttaatgggac

SEQ ID NO: 840 - DNA, 8972 bp, Homo sapiens
  source 1..8972: mol_type = genomic DNA
cgccaacagccacggtcgcctacatctgataagacttatctgctgccccagggcaggccggagctggcgtaagccccagtggggcgctaagtgagtgtgcccctgcctcccgccagcactggcctggcctgcaggcttagcctgggtcatcaaggtatcccacaggctctagttcaaatccagcagaacctctctgagcctcactcttctcacctgcaaaatgggtacagccacatcccttctctccctgcagccaggaagacgcacatacacaggagtctagcccacaccggccccgcacaaattaagggctttactctctgaaaagcccagtgaagtcatgaaaccatatctgctattttcatttatcttggtttcagcctattttgcttgtctggacactacagtccacgggagcctaggtcgagcgaggtccaagaatccccagggtgggcagggagggtggaagagggcctccagtgcccaagaggtgccccacaagcatgggacccgccccctcccctggactgccccacccactggggcaccagccactccctggggaggagggaggagggagaagggagggagggagggagggaggaagggagcctcaaaggccaaggccagccaggacaccccctgggatcacactgagcttgccacatccccaaggcggccgaaccctccgcaaccaccagcccaggtcagtctcagcccccagagagcccccaccaaggcaaccctgggcctgctgcccctacccttatgcttgctccaggctccccaacccacagctggtccccaaagtgtcagccagccctgaatccctttacagctcctccaacccacctgtctttccaactcccatttctaccccaaatctaccccctaaaccccacctctttctgccctctcatccactccgtccaagatatctatatcctctggatcccttcactttgctcgctatacccctaggtctgtctcccctaaacactaactctgtctcccaaaacatgactttatctccccaaatcctttccctgtcccatatctgatttccactcacccaaacttgtctctgtctccctgacttctcctccaaacctcacttttctgctcccaaaccccttatctgctctacaacgccttgtctttgccccactctctctgagcccccaaacctgtctctgatctgccaaaccctagctccatcctcttaccaccatctctgcctttcaaacccactctttgttcccaatgacttctctctgatctccgcaaaccatttatctctcccaactccctgcctgctcagtaaaatatctttgtcacttcaaacaccaagtcaactccccaaaatctgttctgccgcatgaaccctcatgtctgccttccccaaaccgtatctcagccctaaaacacatctcattgtctccctgaatctctccagctccaagcctttctctactccaattctatcttggcttctcaaactcccctttactagccacattctgtctgcccaaacagatctttgactcctaaactccatctctcctccagaaaaacccttgaactccccagacttttctatgaccctcagaatctgactcccacactacttctcaactttatttctgactctcaaacttcgccccgatcccccaacctcgtctgttttcacaacctattcctgagcccaaaatgtgtctctgaacttccaagctcgtctctgctccacaaccccgcccatatctgcctccccacaaactccatggctacaccccaaacctctctgacttaaccccatatctgaccttcaaattccacctctatctccccctaagccccatatctgccccctagaccttatatctgctcccttcagcccggtgagaccctcccttgagggctgggattggaacgttacctggggtgaggggctggggccgagggagagtggagggtgccagctgctgcctgctgccgccgttggggcaacacttactctagtggggcagctgataaggagctttcatatcccccagcctcgagataaactttatctctgtccggagagtgataactgggggtgaggaggctgggcccctgccatgggaggggtgggcagccctggactcaccaacgtgtgaggtgcaggggttgggggcagtggggctggagggagatcatggtgggtaaggtggagttgaggggatgagggaatagtggtgaaagagtgagcagaagacacacaatgagacagggaagagagggagaaacagggagagatgggaagagagagacagagacacagagacaaagagcaagagacaaaagagacatgaagagaaaggaaaaacagagagagagaaactcaacgagtaagagacagagacagacagatggccggagaaaaagaaggaaagacccgggagcagaaaaggagatagaaatgcagagatacacgcaggtagcactgtgaagaggcagagactaacacagaattagagacagagaggaaagagatggagaccaagatggggaagcaaaacactctcttcagagagcaacagcaggcaccctggggctgagaaggtgttggcggtgggcacacttgtggcccatctctttcctagcataactcccaagcctgggcctgccccttagcctgtctataccatgggtcatgtaagcaggagtgaggggcagtttgaagacagccttctagtctagccctgtcactccaccctacagacacagaaacagagcaggccagcacaatagggccagggccagcattccaggctccttatcctgagctgcatgtggctgggtacggtcaggggtatgggactagtaagaggcacgtggacataaggtcagagggcccaaagagagggaaacagagggaacagacaaacaagcaggaagagtgggagagatgcagagatgttcagagagataggagaggagagggagaaagcaagagtaacagaaagagagagccagagagagaaacatgggaagacagaaaagaagacagaaaatcatcaaacattacaaaagcacagaaagaggtcgggcgcagtggctcacgcctataacctcagcactgtgggaggccgaggtgggccgatcacttgaggtcaggagttcaagaccagcctggccaacatggcaaaacctcgtctttactaaaaatacaaaaattagctgggtgtggtggcatgtgcctgtaatcccagctactagggaggctgaggcacgagaatcacttgaacctgggaggctggggttgcagtgagctgagatcgcaccactgcacaccagcctgggtgacagagtgagactccgtctcaaaaaaaaaaaaaaaagaaaaagaaaaagcacagaaggagaagacaagctatatcatagaaacacagaaagctggggaagctacagagtcagacttgagagggaacagagagtcaggggaaagagccccaggggatagagaagtggagagctagatgacagacacacacaaggcaaaacaggcaaagggccatcccacaggtctcagctcagccccagcccatcaccacccccaatacagcagatggggaaactgaggcctgggaactgaaagagcctgaaagcagaactctggtgggcctctccaggggagagggtaccggtagaggtacctcccacctgccaccctcttcagaggaagtcagtggccttggggtgatttcaaaagttgggcggggaaggcagagataagcagtggggggtactgacccccccccaaccaagaagtagggaggaactaagggggccttctgtctgtagacgcaacagaggtggagggaggagggagtcaagcccggaaaccatggggtttctgagaaagttagagggcaagatacaacagatagggatgaagttggggagcagaggatggtgaaccccaaagtcctgggtgaagtgaccaagaggcaagggactctggtcctgcatgccatcccaccctcacccagactcttctagagggggagggaagaaaggacggggggacggggagaataagaggaagtggaggaggggaggagaggagatggggaaagggagaaaaggatgaacagaaaagggaggagaaggatgaagaaattggaggggaggagaaaatgagtagtaggagaaaggagtggagagtagatgtagacaggggaagagaggccggaagtggtggctcacacctgtaatcccagtactttgggaggctgaggtgggaggatcacttgaggccaggagttcaagaccagcctgggcaacagagtcataccccatttctacaaaaaaaaaacaaaaactagccaggcctggtggcacacacctgtagtcccagctactcaggaggctgaggcaggaggatcactgccgggaggcagtggttgcagtgagccgagatcgtgccactgcactccagcctggcaacagaggagaccctgcctcaaaaaaaagtgtgtgtggatgggggagagggagataaggtgtgtgagaaaggtagaaaaggagaatgaagacaaaaagagaaggaggacaaggaagaggggaaacaggaaaggagaaggaggaggtcaaggaggaaaagaagaaggtggaggagaaaaaggaagcaggagagaatgagaaaagagtggaaagagaaggaaatggggaagaggggggcaaagaagagatgggaagaagagagacgggagaaagacaggaggaaaagggaaggggggaagaagagagagaatggaaggaagaagggagaggtagaagcagatgagagtggaggaagagcgagaggagggaggagaggaaagacaaacggcaagagggggagaacgaggaggaagatgaaaggaggggcacacaggagtggaacggggagatgcaggagggaaaagagaggagagggaggaagagaaggaggggaaggagaggggagactaaggtgaggaggaggggggaatggggaggtgggaaggagaaatatggagactgaggtgatggagtgggaggagggggaaaggagggaagaggagcaggtgaaaggaggtgggggggaaggatttctgtgtctgaggaccccttctgtcctcgcaggttaatccccagaggctccatggagttccctggcctggggtccctggggacctcagagcccctcccccagtttgtggatcctgctctggtgtcctccacaccagaatcaggggttttcttcccctctgggcctgagggcttggatgcagcagcttcctccactgccccgagcacagccaccgctgcagctgcggcactggcctactacagggacgctgaggcctacagacactccccaggtaactccattgagtggctgtcttggcattggctgagtgctgttggggttgccatggagatccttggctaggtcagaataccactgtgaggatatctcagaaatggctggaagcttctcaaatggatgtgccgaccactttccctagttaagtgcagacctgggaattccaatgctcctcaacctgccatattggggcggccacactgagaggcaatactggaagtatgtggtggttgccctagttgtcgagtgatccgtggagctccaaatcccaacagtcatcctcaaaaacccacttggaaatggtcagaggttattgcagaggccacactgaccagtgggggtcaggatccaggaagcatccaatggccagcagctgttctggtagcctgtggaaaagctgggaacttggccaccatgttgggggtgctgggaaccactgcaccctgacgtgcgctgaccctagactgattttgcctcttctttcctccatccctacctgcccccaacagtctttcaggtgtacccattgctcaactgtatggaggggatcccagggggctcaccatatgccggctgggcctacggcaagacggggctctaccctgcctcaactgtgtgtcccacccgcgaggactctcctccccaggccgtggaagatctggatggaaaaggcagcaccagcttcctggagactttgaagacagagcggctgagcccagacctcctgaccctgggacctgcactgccttcatcactccctgtccccaatagtgcttatgggggccctgacttttccagtaccttcttttctcccaccgggagccccctcaattcagcagcctattcctctcccaagcttcgtggaactctccccctgcctccctgtggtgagaaattcaaaaaaggacagggaagttgaggtgggaggggtggcccaaagtaaagctgagctgagcctagctccctcttctcctctccaccccaccagaggccagggagtgtgtgaactgcggagcaacagccactccactgtggcggagggacaggacaggccactacctatgcaacgcctgcggcctctatcacaagatgaatgggcagaacaggcccctcatccggcccaagaagcgcctggtaagaccacagacctgcttcaccttatacacaggaacccctgtcctcaccctgtacaagaagccacatcttcccattatataggaacgctgttctcatgattacaggaagctactgcaggccaccctgtatgggaacccctgtcccaatatcacatggaaacccttgccttcatcctacacaggaaaatctcctcatcccatatggaaatccttgccctcaccctgcatgagaactcctgccctttccttgtacaggaacccagatctatagaagctcctatcctcaacctacccttataagcttcaaacagaaacctttgtcctcaccctgcacaccagtgttttcgtccttggcttcacactggaatcaccccaggtcccttctcccagatgtgctgatggaattggactgggatgctgcttgggcatcaggatattttagctccccaagtgattccgatacgcagccaaagctgagaaccaccaatgtagtcccccatagaatacagaacaaaagaaacttataccagataggaacccctgtactggccccatacagaatcctcaggcatcaccctgtaaacaaagccctgccttcaacctgaccctcacttcttgggtcctcctgacatcccctgtgagccccttacccccacttccacatccccagggcactgatctcacatcctgtcgtcccctagattgtcagtaaacgggcaggtactcagtgcaccaactgccagacgaccaccacgacactgtggcggagaaatgccagtggggatcccgtgtgcaatgcctgcggcctctactacaagctacaccaggtgacgccctgccccttggagccacccctctgctttccctgtcttcatgccacactgccccccactctgttcctgttctacctctctcttcccccacaaccctctttcctctttcccctttccctccttcctcccccttcccccatctcttctactttcccccttcctccatctcttctactttcccccttctctgttattaccctccctccttccttctccattccctcctcctccgccctcctccttcctctcctctcccccacctccaggcatcagctaatgtccaaccccctgccctagaccttgggcagctcctatcagccttggaggctttcctaagctcagggcctcacagcctcaggattccttggacaatctcagcacccaaaaattatcttaccctgaaagaagtggggtagagagggtgtccctggttgacacagagaggcaaaggtctggagttggggacacccgcagcctcctttttggcaggtgaaccggccactgaccatgcggaaggatggtattcagactcgaaaccgcaaggcatctggaaaagggaaaaagaaacggggctccagtctgggaggcacaggagcagccgaaggaccagctggtggctttatggtggtggctgggggcagcggtagcgggaattgtggggaggtggcttcaggcctgacactgggccccccaggtactgcccatctctaccaaggcctgggccctgtggtgctgtcagggcctgttagccacctcatgcctttccctggacccctactgggctcacccacgggctccttccccacaggccccatgccccccaccaccagcactactgtggtggctccgctcagctcatgagggcacagagcatggcctccagaggaggggtggtgtccttctcctcttgtagccagaattctggacaacccaagtctctgggccccaggcaccccctggcttgaaccttcaaagcttttgtaaaataaaaccaccaaagtcctgaaattgtgggtgtgtctatgtgtggctgaacagcagagctgagtggagtgtgtaacaatgcctgtggctctctgatgacagtgcatggctgcaatgtgtgaccatgtgaggctggctgaggcggcacatgtgacactttgtgaccaagggttatgttgtgtgattggaacaatctatgtgaaacttcttgtgaagtgtccaggtggttccatatgtcatggtaagaggccacgcagggcttgctgacggtgggggtggtgccgggtgactataagcacactggaagtgtgtgtgctggagcaggtgataaggaggtgtgcggggctgtggtcttgtggctgggcatgacgctgggggacctttgagacggcatgacgctgggggaccttttagacagcatgacagcatacgtggtgggcacagaatctggtaaagattcttggaatgttgaacaagaagtgtgtgtcaggatgtgtttgtgggtctggcgatggcaatatttcagtgcaagtccctgtgcatgggcatgggtgtgcgtgtgtgtgcattacgtgtggcatgtgccatgtcacagtgtctctgagtggctgacaacatgagcag

SEQ ID NO: 841 - DNA, 8694 bp, Homo sapiens
  source 1..8694: mol_type = genomic DNA
tacctagagggcgctggaagctctaaagccctagcagttactgcttttactattagtggtcgtttttttctcccccccgccccccgacaaatcaacagaacaaagaaaattacctaaacagcaaggacatagggaggaacttcttggcacagaactttccaaacactttttcctgaagggatacaagaagcaagaaaggtactctttcactaggaccttctctgagctgtcctcaggatgcttttgggactatttttcttacccagagaatggagaaaccctgcagggaattcccaagctgtagttataaacagaagttctccttctgctaggtagcattcaaagatcttaatcttctgggtttccgttttctcgaatgaaaaatgcaggtccgagcagttaactggctggggcaccattagcaagtcacttagcatctctggggccagtctgcaaagcgagggggcagccttaatgtgcctccagcctgaagtcctagaatgagcgcccggtgtcccaagctggggcgcgcaccccagatcggagggcgccgatgtacagacagcaaactcacccagtctagtgcatgccttcttaaacatcacgagactctaagaaaaggaaactgaaaacgggaaagtccctctctctaacctggcactgcgtcgctggcttggagacaggtgacggtccctgcgggccttgtcctgattggctgggcacgcgtttaatataagtggaggcgtcgcgctggcgggcattcctgaagctgacagcattcgggccgagatgtctcgctccgtggccttagctgtgctcgcgctactctctctttctggcctggaggctatccagcgtgagtctctcctaccctcccgctctggtccttcctctcccgctctgcaccctctgtggccctcgctgtgctctctcgctccgtgacttcccttctccaagttctccttggtggcccgccgtggggctagtccagggctggatctcggggaagcggcggggtggcctgggagtggggaagggggtgcgcacccgggacgcgcgctacttgcccctttcggcggggagcaggggagacctttggcctacggcgacgggagggtcgggacaaagtttagggcgtcgataagcgtcagagcgccgaggttgggggagggtttctcttccgctctttcgcggggcctctggctcccccagcgcagctggagtgggggacgggtaggctcgtcccaaaggcgcggcgctgaggtttgtgaacgcgtggaggggcgcttggggtctgggggaggcgtcgcccgggtaagcctgtctgctgcggctctgcttcccttagactggagagctgtggacttcgtctaggcgcccgctaagttcgcatgtcctagcacctctgggtctatgtggggccacaccgtggggaggaaacagcacgcgacgtttgtagaatgcttggctgtgatacaaagcggtttcgaataattaacttatttgttcccatcacatgtcacttttaaaaaattataagaactacccgttattgacatctttctgtgtgccaaggactttatgtgctttgcgtcatttaattttgaaaacagttatcttccgccatagataactactatggttatcttctgcctctcacagatgaagaaactaaggcaccgagattttaagaaacttaattacacaggggataaatggcagcaatcgagattgaagtcaagcctaaccagggcttttgcgggagcgcatgccttttggctgtaattcgtgcatttttttttaagaaaaacgcctgccttctgcgtgagattctccagagcaaactgggcggcatgggccctgtggtcttttcgtacagagggcttcctctttggctctttgcctggttgtttccaagatgtactgtgcctcttactttcggttttgaaaacatgagggggttgggcgtggtagcttacgcctgtaatcccagcacttagggaggccgaggcgggaggatggcttgaggtccgtagttgagaccagcctggccaacatggtgaagcctggtctctacaaaaaataataacaaaaattagccgggtgtggtggctcgtgcctgtggtcccagctgctccggtggctgaggcgggaggatctcttgagcttaggcttttgagctatcatggcgccagtgcactccagcgtgggcaacagagcgagaccctgtctctcaaaaaagaaaaaaaaaaaaaaagaaagagaaaagaaaagaaagaaagaagtgaaggtttgtcagtcaggggagctgtaaaaccattaataaagataatccaagatggttaccaagactgttgaggacgccagagatcttgagcactttctaagtacctggcaatacactaagcgcgctcaccttttcctctggcaaaacatgatcgaaagcagaatgttttgatcatgagaaaattgcatttaatttgaatacaatttatttacaacataaaggataatgtatatatcaccaccattactggtatttgctggttatgttagatgtcattttaaaaaataacaatctgatatttaaaaaaaaatcttattttgaaaatttccaaagtaatacatgccatgcatagaccatttctggaagataccacaagaaacatgtaatgatgattgcctctgaaggtctattttcctcctctgacctgtgtgtgggttttgtttttgttttactgtgggcataaattaatttttcagttaagttttggaagcttaaataactctccaaaagtcataaagccagtaactggttgagcccaaattcaaacccagcctgtctgatacttgtcctcttcttagaaaagattacagtgatgctctcacaaaatcttgccgccttccctcaaacagagagttccaggcaggatgaatctgtgctctgatccctgaggcatttaatatgttcttattattagaagctcagatgcaaagagctctcttagcttttaatgttatgaaaaaaatcaggtcttcattagattccccaatccacctcttgatggggctagtagcctttccttaatgatagggtgtttctagagagatatatctggtcaaggtggcctggtactcctccttctccccacagcctcccagacaaggaggagtagctgccttttagtgatcatgtaccctgaatataagtgtatttaaaagaattttatacacatatatttagtgtcaatctgtatatttagtagcactaacacttctcttcattttcaatgaaaaatatagagtttataatattttcttcccacttccccatggatggtctagtcatgcctctcattttggaaagtactgtttctgaaacattaggcaatatattcccaacctggctagtttacagcaatcacctgtggatgctaattaaaacgcaaatcccactgtcacatgcattactccatttgatcataatggaaagtatgttctgtcccatttgccatagtcctcacctatccctgttgtattttatcgggtccaactcaaccatttaaggtatttgccagctcttgtatgcatttaggttttgtttctttgttttttagctcatgaaattaggtacaaagtcagagaggggtctggcatataaaacctcagcagaaataaagaggttttgttgtttggtaagaacataccttgggttggttgggcacggtggctcgtgcctgtaatcccaacactttgggaggccaaggcaggctgatcacttgaagttgggagttcaagaccagcctggccaacatggtgaaatcccgtctctactgaaaatacaaaaattaaccaggcatggtggtgtgtgcctgtagtcccaggaatcacttgaacccaggaggcggaggttgcagtgagctgagatctcaccactgcacactgcactccagcctgggcaatggaatgagattccatcccaaaaaataaaaaaataaaaaaataaagaacataccttgggttgatccacttaggaacctcagataataacatctgccacgtatagagcaattgctatgtcccaggcactctactagacacttcatacagtttagaaaatcagatgggtgtagatcaaggcaggagcaggaaccaaaaagaaaggcataaacataagaaaaaaaatggaaggggtggaaacagagtacaataacatgagtaatttgatgggggctattatgaactgagaaatgaactttgaaaagtatcttggggccaaatcatgtagactcttgagtgatgtgttaaggaatgctatgagtgctgagagggcatcagaagtccttgagagcctccagagaaaggctcttaaaaatgcagcgcaatctccagtgacagaagatactgctagaaatctgctagaaaaaaaacaaaaaaggcatgtatagaggaattatgagggaaagataccaagtcacggtttattcttcaaaatggaggtggcttgttgggaaggtggaagctcatttggccagagtggaaatggaattgggagaaatcgatgaccaaatgtaaacacttggtgcctgatatagcttgacaccaagttagccccaagtgaaataccctggcaatattaatgtgtcttttcccgatattcctcaggtactccaaagattcaggtttactcacgtcatccagcagagaatggaaagtcaaatttcctgaattgctatgtgtctgggtttcatccatccgacattgaagttgacttactgaagaatggagagagaattgaaaaagtggagcattcagacttgtctttcagcaaggactggtctttctatctcttgtactacactgaattcacccccactgaaaaagatgagtatgcctgccgtgtgaaccatgtgactttgtcacagcccaagatagttaagtggggtaagtcttacattcttttgtaagctgctgaaagttgtgtatgagtagtcatatcataaagctgctttgatataaaaaaggtctatggccatactaccctgaatgagtcccatcccatctgatataaacaatctgcatattgggattgtcagggaatgttcttaaagatcagattagtggcacctgctgagatactgatgcacagcatggtttctgaaccagtagtttccctgcagttgagcagggagcagcagcagcacttgcacaaatacatatacactcttaacacttcttacctactggcttcctctagcttttgtggcagcttcaggtatatttagcactgaacgaacatctcaagaaggtataggcctttgtttgtaagtcctgctgtcctagcatcctataatcctggacttctccagtactttctggctggattggtatctgaggctagtaggaagggcttgttcctgctgggtagctctaaacaatgtattcatgggtaggaacagcagcctattctgccagccttatttctaaccattttagacatttgttagtacatggtattttaaaagtaaaacttaatgtcttccttttttttctccactgtctttttcatagatcgagacatgtaagcagcatcatggaggtaagtttttgaccttgagaaaatgtttttgtttcactgtcctgaggactatttatagacagctctaacatgataaccctcactatgtggagaacattgacagagtaacattttagcagggaaagaagaatcctacagggtcatgttcccttctcctgtggagtggcatgaagaaggtgtatggccccaggtatggccatattactgaccctctacagagagggcaaaggaactgccagtatggtattgcaggataaaggcaggtggttacccacattacctgcaaggctttgatctttcttctgccatttccacattggacatctctgctgaggagagaaaatgaaccactcttttcctttgtataatgttgttttattcttcagacagaagagaggagttatacagctctgcagacatcccattcctgtatggggactgtgtttgcctcttagaggttcccaggccactagaggagataaagggaaacagattgttataacttgatataatgatactataatagatgtaactacaaggagctccagaagcaagagagagggaggaacttggacttctctgcatctttagttggagtccaaaggcttttcaatgaaattctactgcccagggtacattgatgctgaaaccccattcaaatctcctgttatattctagaacagggaattgatttgggagagcatcaggaaggtggatgatctgcccagtcacactgttagtaaattgtagagccaggacctgaactctaatatagtcatgtgttacttaatgacggggacatgttctgagaaatgcttacacaaacctaggtgttgtagcctactacacgcataggctacatggtatagcctattgctcctagactacaaacctgtacagcctgttactgtactgaatactgtgggcagttgtaacacaatggtaagtatttgtgtatctaaacatagaagttgcagtaaaaatatgctattttaatcttatgagaccactgtcatatatacagtccatcattgaccaaaacatcatatcagcattttttcttctaagattttgggagcaccaaagggatacactaacaggatatactctttataatgggtttggagaactgtctgcagctacttcttttaaaaaggtgatctacacagtagaaattagacaagtttggtaatgagatctgcaatccaaataaaataaattcattgctaacctttttcttttcttttcaggtttgaagatgccgcatttggattggatgaattccaaattctgcttgcttgctttttaatattgatatgcttatacacttacactttatgcacaaaatgtagggttataataatgttaacatggacatgatcttctttataattctactttgagtgctgtctccatgtttgatgtatctgagcaggttgctccacaggtagctctaggagggctggcaacttagaggtggggagcagagaattctcttatccaacatcaacatcttggtcagatttgaactcttcaatctcttgcactcaaagcttgttaagatagttaagcgtgcataagttaacttccaatttacatactctgcttagaatttgggggaaaatttagaaatataattgacaggattattggaaatttgttataatgaatgaaacattttgtcatataagattcatatttacttcttatacatttgataaagtaaggcatggttgtggttaatctggtttatttttgttccacaagttaaataaatcataaaacttgatgtgttatctcttatatctcactcccactattacccctttattttcaaacagggaaacagtcttcaagttccacttggtaaaaaatgtgaaccccttgtatatagagtttggctcacagtgtaaagggcctcagtgattcacattttccagattaggaatctgatgctcaaagaagttaaatggcatagttggggtgacacagctgtctagtgggaggccagccttctatattttagccagcgttctttcctgcgggccaggtcatgaggagtatgcagactctaagagggagcaaaagtatctgaaggatttaatattttagcaaggaatagatatacaatcatcccttggtctccctgggggattggtttcaggaccccttcttggacaccaaatctatggatatttaagtcccttctataaaatggtatagtatttgcatataacctatccacatcctcctgtatactttaaatcatttctagattacttgtaatacctaatacaatgtaaatgctatgcaaatagttgttattgtttaaggaataatgacaagaaaaaaaagtctgtacatgctcagtaaagacacaaccatccctttttttccccagtgtttttgatccatggtttgctgaatccacagatgtggagcccctggatacggaaggcccgctgtactttgaatgacaaataacagatttaaaattttcaaggcatagttttatacctgatggccagctttgtttatttgaccaagaatctgagttagctagttctaggtactgacaggataaataaaacacaacactgctcccgatcttctcagtttagcagagggacagatatgcactcaaataattaaaatatatcctgataagaatatagcataggtacgcgcgaagaacttggcaatcgaaattttgttgttcaggctgggcgaggtgtctcatgtctgtaatcccagcactttgggaggccatggtaggatgatcgcttgagcccaggagtccgagaccagcctgggcaacataacaagaccctgtctcaattcaaagaattgaattaaaaaaaacaaaaaataatttttttaaaaaagaaatgttgttgttcaaggaacaacaacaaaaatctagggaggtgttagagaagccatttgcctgagctgagagtaagttgctagtggttctcttgattggtaggtggggcctgggtttccaggcatggtagccaggaaggacagccacatggcaggtttgggtaattccaaacagtggaggaagggtgtctgggggaagacttgtagga

SEQ ID NO: 842 - DNA, 2043 bp, Homo sapiens
  source 1..2043: mol_type = genomic DNA
gactatcgccagagggaaagggagctgcaggaagcgaggctggagagcaggaggggctctgcgcagaaattcttttgagttcctatgggccagggcgtccgggtgcgcgcattcctctccgccccaggattgggcgaagcctcccggctcgcactcgctcgcccgtgtgttccccgatcccgctggagtcgatgcgcgtccagcgcgtgccaggccggggcgggggtgcgggctgactttctccctcgctagggacgctccggcgcccgaaaggaaagggtggcgctgcgctccggggtgcacgagccgacagcgcccgaccccaacgggccggccccgccagcgccgctaccgccctgcccccgggcgagcgggatgggcgggagtggagtggcgggtggagggtggagacgtcctggcccccgccccgcgtgcacccccaggggaggccgagcccgccgcccggccccgcgcaggccccgcccgggactcccctgcggtccaggccgcgccccgggctccgcgccagccaatgagcgccgcccggccgggcgtgcccccgcgccccaagcataaaccctggcgcgctcgcggcccggcactcttctggtccccacagactcagagagaacccaccatggtgctgtctcctgccgacaagaccaacgtcaaggccgcctggggtaaggtcggcgcgcacgctggcgagtatggtgcggaggccctggagaggtgaggctccctcccctgctccgacccgggctcctcgcccgcccggacccacaggccaccctcaaccgtcctggccccggacccaaaccccacccctcactctgcttctccccgcaggatgttcctgtccttccccaccaccaagacctacttcccgcacttcgacctgagccacggctctgcccaggttaagggccacggcaagaaggtggccgacgcgctgaccaacgccgtggcgcacgtggacgacatgcccaacgcgctgtccgccctgagcgacctgcacgcgcacaagcttcgggtggacccggtcaacttcaaggtgagcggcgggccgggagcgatctgggtcgaggggcgagatggcgccttcctcgcagggcagaggatcacgcgggttgcgggaggtgtagcgcaggcggcggctgcgggcctgggccctcggccccactgaccctcttctctgcacagctcctaagccactgcctgctggtgaccctggccgcccacctccccgccgagttcacccctgcggtgcacgcctccctggacaagttcctggcttctgtgagcaccgtgctgacctccaaataccgttaagctggagcctcggtggccatgcttcttgccccttgggcctccccccagcccctcctccccttcctgcacccgtacccccgtggtctttgaataaagtctgagtgggcggcagcctgtgtgtgcctgagttttttccctcagcaaacgtgccaggcatgggcgtggacagcagctgggacacacatggctagaacctctctgcagctggatagggtaggaaaaggcaggggcgggaggaggggatggaggagggaaagtggagccaccgcgaagtccagctggaaaaacgctggaccctagagtgctttgaggatgcatttgctctttcccgagttttattcccagacttttcagattcaatgcaggtttgctgaaataatgaatttatccatctttacgtttctgggcactcttgtgccaagaactggctggctttctgcctgggacgtcactggtttcccagaggtcctcccacatatgggtggtgggtaggtcagagaagtcccactccagcatggctgcattgatcccccatcgttcccactagtctccgtaaaacctcccagatacaggcacagtctagatgaaatcaggggtgcggggtgcaactgcaggccccaggcaattcaataggggctctactttcacccccaggtcaccccagaatgctcacacaccagacactgacgccctggggctgtcaagatcagg

SEQ ID NO: 843 - DNA, 2035 bp, Homo sapiens
  source 1..2035: mol_type = genomic DNA
gactatcgccagagggaaagggagctgcaggaagcgaggctggagagcaggaggggctctgcgcagaaattcttttgagttcctatgggccagggcgtccgggtgcgcgcattcctctccgccccaggattgggcgaagccctccggctcgcactcgctcgcccgtgtgttccccgatcccgctggagtcgatgcgcgtccagcgcgtgccaggccggggcgggggtgcgggctgactttctccctcgctagggacgctccggcgcccgaaaggaaagggtggcgctgcgctccggggtgcacgagccgacagcgcccgaccccaacgggccggccccgccagcgccgctaccgccctgcccccgggcgagcgggatgggcgggagtggagtggcgggtggagggtggagacgtcctggcccccgccccgcgtgcacccccaggggaggccgagcccgccgcccggccccgcgcaggccccgcccgggactcccctgcggtccaggccgcgccccgggctccgcgccagccaatgagcgccgcccggccgggcgtgcccccgcgccccaagcataaaccctggcgcgctcgcgggccggcactcttctggtccccacagactcagagagaacccaccatggtgctgtctcctgccgacaagaccaacgtcaaggccgcctggggtaaggtcggcgcgcacgctggcgagtatggtgcggaggccctggagaggtgaggctccctcccctgctccgacccgggctcctcgcccgcccggacccacaggccaccctcaaccgtcctggccccggacccaaaccccacccctcactctgcttctccccgcaggatgttcctgtccttccccaccaccaagacctacttcccgcacttcgacctgagccacggctctgcccaggttaagggccacggcaagaaggtggccgacgcgctgaccaacgccgtggcgcacgtggacgacatgcccaacgcgctgtccgccctgagcgacctgcacgcgcacaagcttcgggtggacccggtcaacttcaaggtgagcggcgggccgggagcgatctgggtcgaggggcgagatggcgccttcctctcagggcagaggatcacgcgggttgcgggaggtgtagcgcaggcggcggctgcgggcctgggccgcactgaccctcttctctgcacagctcctaagccactgcctgctggtgaccctggccgcccacctccccgccgagttcacccctgcggtgcacgcctccctggacaagttcctggcttctgtgagcaccgtgctgacctccaaataccgttaagctggagcctcggtagccgttcctcctgcccgctgggcctcccaacgggccctcctcccctccttgcaccggcccttcctggtctttgaataaagtctgagtgggcagcagcctgtgtgtgcctgggttctctctatcccggaatgtgccaacaatggaggtgtttacctgtctcagaccaaggacctctctgcagctgcatggggctggggagggagaactgcagggagtatgggaggggaagctgaggtgggcctgctcaagagaaggtgctgaaccatcccctgtcctgagaggtgccaggcctgcaggcagtggctcagaagctggggaggagagaggcatccagggttctactcagggagtcccagcatcgccaccctcctttgaaatctccctggttgaacccagttaacatacgctctccatcaaaacaaaacgaaacaaaacaaactagcaaaataggctgtccccagtgcaagtgcaggtgccagaacatttctctcattcccaccccttcctgccagagggtaggtggctggagtgagggtgctggccctactcacacttcctgtgtcacggtgaccctctgagagcagcccagtcagtggggaaggaggaaggggctgggatgctcacagccggcagcccacacctggggagactcttcagcagagcaccttgcggccttactcctgcacgtctcctgc

SEQ ID NO: 844 - DNA, 5132 bp, Homo sapiens
  source 1..5132: mol_type = genomic DNA
agactaaacagtagagcatgtataaaaatactctagtcaagtgctgcttttgaaacaaatgataaaaccacactcccatagatgagtgtcatgattttcatggaggaagttaatattcatcctctaagtatacccagactagggccattctgatataaaacattaggacttaagaaagattaatagactggagtaaaggaaatggacctctgtctctctcgctgtctcttttttgaggacttgtgtgtgtgtgtgtgtgtgtgtgtgtgtgtgtgttgtggtcagtggggctggaataaaagtagaatagacctgcacctgctgtggcatccattcacagagtagaagcaagctcacaatagtgaagatgtcagtaagcttgaatagtttttcaggaactttgaatgctgatttagatttgaaactgaggctctgaccataaccaaatttgcactatttattgcttcttgaaacttatttgcctggtatgcctgggcttttgatggtcttagtatagcttgcagccttgtccctgcagggtattatgggtaatagaaagaaaagtctgcgttacactctagtcacactaagtaactaccattggaaaagcaacccctgccttgaagccaggatgatggtatctgcagcagttgccaacacaagagaaggatccatagttcatcatttaaaaaagaaaacaaaatagaaaaaggaaaactatttctgagcataagaagttgtagggtaagtctttaagaaggtgacaatttctgccaatcaggatttcaaagctcttgctttgacaattttggtctttcagaatactataaatataacctatattataatttcataaagtctgtgcattttctttgacccaggatatttgcaaaagacatattcaaacttccgcagaacactttatttcacatatacatgcctcttatatcagggatgtgaaacagggtcttgaaaactgtctaaatctaaaacaatgctaatgcaggtttaaatttaataaaataaaatccaaaatctaacagccaagtcaaatctgcatgttttaacatttaaaatattttaaagacgtcttttcccaggattcaacatgtgaaatcttttctcagggatacacgtgtgcctagatcctcattgctttagttttttacagaggaatgaatataaaaagaaaatacttaaattttatccctcttacctctataatcatacataggcataattttttaacctaggctccagatagccatagaagaaccaaacactttctgcgtgtgtgagaataatcagagtgagattttttcacaagtacctgatgagggttgagacaggtagaaaaagtgagagatctctatttatttagcaataatagagaaagcatttaagagaataaagcaatggaaataagaaatttgtaaatttccttctgataactagaaatagaggatccagtttcttttggttaacctaaattttatttcattttattgttttattttattttattttattttattttgtgtaatcgtagtttcagagtgttagagctgaaaggaagaagtaggagaaacatgcaaagtaaaagtataacactttccttactaaaccgacatgggtttccaggtaggggcaggattcaggatgactgacagggcccttagggaacactgagaccctacgctgacctcataaatgcttgctacctttgctgttttaattacatcttttaatagcaggaagcagaactctgcacttcaaaagtttttcctcacctgaggagttaatttagtacaaggggaaaaagtacagggggatgggagaaaggcgatcacgttgggaagctatagagaaagaagagtaaattttagtaaaggaggtttaaacaaacaaaatataaagagaaataggaacttgaatcaaggaaatgattttaaaacgcagtattcttagtggactagaggaaaaaaataatctgagccaagtagaagaccttttcccctcctacccctactttctaagtcacagaggctttttgttcccccagacactcttgcagattagtccaggcagaaacagttagatgtccccagttaacctcctatttgacaccactgattaccccattgatagtcacactttgggttgtaagtgactttttatttatttgtatttttgactgcattaagaggtctctagttttttatctcttgtttcccaaaacctaataagtaactaatgcacagagcacattgatttgtatttattctatttttagacataatttattagcatgcatgagcaaattaagaaaaacaacaacaaatgaatgcatatatatgtatatgtatgtgtgtatatatacacacatatatatatatattttttcttttcttaccagaaggttttaatccaaataaggagaagatatgcttagaaccgaggtagagttttcatccattctgtcctgtaagtattttgcatattctggagacgcaggaagagatccatctacatatcccaaagctgaattatggtagacaaaactcttccacttttagtgcatcaacttcttatttgtgtaataagaaaattgggaaaacgatcttcaatatgcttaccaagctgtgattccaaatattacgtaaatacacttgcaaaggaggatgtttttagtagcaatttgtactgatggtatggggccaagagatatatcttagagggagggctgagggtttgaagtccaactcctaagccagtgccagaagagccaaggacaggtacggctgtcatcacttagacctcaccctgtggagccacaccctagggttggccaatctactcccaggagcagggagggcaggagccagggctgggcataaaagtcagggcagagccatctattgcttacatttgcttctgacacaactgtgttcactagcaacctcaaacagacaccatggtgcatctgactcctgaggagaagtctgccgttactgccctgtggggcaaggtgaacgtggatgaagttggtggtgaggccctgggcaggttggtatcaaggttacaagacaggtttaaggagaccaatagaaactgggcatgtggagacagagaagactcttgggtttctgataggcactgactctctctgcctattggtctattttcccacccttaggctgctggtggtctacccttggacccagaggttctttgagtcctttggggatctgtccactcctgatgctgttatgggcaaccctaaggtgaaggctcatggcaagaaagtgctcggtgcctttagtgatggcctggctcacctggacaacctcaagggcacctttgccacactgagtgagctgcactgtgacaagctgcacgtggatcctgagaacttcagggtgagtctatgggacgcttgatgttttctttccccttcttttctatggttaagttcatgtcataggaaggggataagtaacagggtacagtttagaatgggaaacagacgaatgattgcatcagtgtggaagtctcaggatcgttttagtttcttttatttgctgttcataacaattgttttcttttgtttaattcttgctttctttttttttcttctccgcaatttttactattatacttaatgccttaacattgtgtataacaaaaggaaatatctctgagatacattaagtaacttaaaaaaaaactttacacagtctgcctagtacattactatttggaatatatgtgtgcttatttgcatattcataatctccctactttattttcttttatttttaattgatacataatcattatacatatttatgggttaaagtgtaatgttttaatatgtgtacacatattgaccaaatcagggtaattttgcatttgtaattttaaaaaatgctttcttcttttaatatacttttttgtttatcttatttctaatactttccctaatctctttctttcagggcaataatgatacaatgtatcatgcctctttgcaccattctaaagaataacagtgataatttctgggttaaggcaatagcaatatctctgcatataaatatttctgcatataaattgtaactgatgtaagaggtttcatattgctaatagcagctacaatccagctaccattctgcttttattttatggttgggataaggctggattattctgagtccaagctaggcccttttgctaatcatgttcatacctcttatcttcctcccacagctcctgggcaacgtgctggtctgtgtgctggcccatcactttggcaaagaattcaccccaccagtgcaggctgcctatcagaaagtggtggctggtgtggctaatgccctggcccacaagtatcactaagctcgctttcttgctgtccaatttctattaaaggttcctttgttccctaagtccaactactaaactgggggatattatgaagggccttgagcatctggattctgcctaataaaaaacatttattttcattgcaatgatgtatttaaattatttctgaatattttactaaaaagggaatgtgggaggtcagtgcatttaaaacataaagaaatgaagagctagttcaaaccttgggaaaatacactatatcttaaactccatgaaagaaggtgaggctgcaaacagctaatgcacattggcaacagcccctgatgcatatgccttattcatccctcagaaaaggattcaagtagaggcttgatttggaggttaaagttttgctatgctgtattttacattacttattgttttagctgtcctcatgaatgtcttttcactacccatttgcttatcctgcatctctcagccttgactccactcagttctcttgcttagagataccacctttcccctgaagtgttccttccatgttttacggcgagatggtttctcctcgcctggccactcagccttagttgtctctgttgtcttatagaggtctacttgaagaaggaaaaacaggggtcatggtttgactgtcctgtgagcccttcttccctgcctcccccactcacagtgacccggaatctgcagtgctagtctcccggaactatcactctttcacagtctgcttt

SEQ ID NO: 845 - DNA, 12180 bp, Homo sapiens
  source 1..12180: mol_type = genomic DNA
ggcagagcttgcggtgagcagagatcgcgccactgcacactccagcctgggtgacaaagcgagactccatctcaaaaaaaaaaaaaaaaaaaagaaaaagaaagaaagaaagaaaaaaaaactgatgaaattgtgtattcaatgtagtctcaagagaattgaaaaccaagaaaggctgtggcttcttccacataaagcctggatgaataacaggataacacgttgttacattgtcacaactcctgatccaggaattgatggctaagatattcgtaattcttatccttttcagttgtaacttattcctatttgtcagcattcaggttattagcggctgctggcgaagtccttgagaaataaactgcacactggatggtgggggtagtgtaggaaaatggaggggaaggaagtaaagtttcaaattaagcctgaacagcaaagttcccctgagaaggccacctggattctatcagaaactcgaatgtccatcttgcaaaacttccttgcccaaaccccacccctggagtcacaacccacccttgaccaatagattcattttactgagggaggcaaagggctggtcaatagattcatttcactgggagaggcaaagggctgggggccagagaggagaagtaaaaagccacacatgaagcagcaatgcaggcatgcttctggctcatctgtgatcaccaggaaactcccagatctgacactgtagtgcatttcactgctgacaagaaggctgctgccaccagcctgtgaagcaaggttaaggtgagaaggctggaggtgagattctgggcaggtaggtactggaagccgggacaaggtgcagaaaggcagaaagtgtttctgaaagagggattagcccgttgtcttacatagtctgactttgcacctgctctgtgattatgactatcccacagtctcctggttgtctacccatggacctagaggtactttgaaagttttggatatctgggctctgactgtgcaataatgggcaaccccaaagtcaaggcacatggcaagaaggtgctgatctccttcggaaaagctgttatgctcacggatgacctcaaaggcacctttgctacactgagtgacctgcactgtaacaagctgcacgtggaccctgagaacttcctggtgagtagtaagtacactcacgctttcttctttacccttagatatttgcactatgggtacttttgaaagcagaggtggctttctcttgtgttatgagtcagctatgggatatgatatttcagcagtgggattttgagagttatgttgctgtaaataacataactaaaatttggtagagcaaggactatgaataatggaaggccacttaccatttgatagctctgaaaaacacatcttataaaaaattctggccaaaatcaaactgagtgtttttggatgagggaacagaagttgagatagagaaaataacatctttcctttggtcagcgaaattttctataaaaattaatagtcacttttctgcatagtcctggaggttagaaaaagatcaactgaacaaagtagtgggaagctgttaaaaagaggattgtttccctccgaatgatgatggtatacttttgtacgcatggtacaggattctttgttatgagtgtttgggaaaattgtatgtatgtatgtatgtatgtatgtgatgactggggacttatcctatccattactgttccttgaagtactattatcctactttttaaaaggacgaagtctctaaaaaaaaaatgaaacaatcacaatatgttggggtagtgagttggcatagcaagtaagagaaggataggacacaatgggaggtgcagggctgccagtcatattgaagctgatatctagcccataatggtgagagttgctcaaactctggtgaaaaaggatgtaagtgttatatctatttactgcaagtccagcttgaggccttctattcactatgtaccattttcttttttatcttcactccctccccagctcttaggcaacgtgatattgattgttttggcaacccacttcagcgaggattttaccctacagatacaggcttcttggcagtaactaacaaatgctgtggttaatgctgtagcccacaagaccactgagttccctgtccactatgtttgtacctatggtccactatgtttgtacctatgtcccaaaatctcatctcctttagatgggggaggttggggagaagagcagtatcctgcctgctgattcagttcctgcatgataaaaatagaataaagaaatatgctctctaagaaatatcattgtactctttttctgtctttatattttaccctgattcagccaaaaggacgcactatttctgatggaaatgagaatgttggagaatgggagtttaaggacagagaagatactttcttgcaatcctgcaagaaaagagagaactcgtgggtggatttagtggggtagttactcctaggaaggggaaatcgtctctagaataagacaatgtttttacagaaagggaggtcaatggaggtactctttggaggtgtaagaggattgttggtagtgtgtagaggtatgttaggactcaaattagaagttctgtataggctattatttgtatgaaactcaggatatagctcatttggtgactgcagttcacttctacttattttaaacaacatattttttattatttataatgaagtggggatggggcttcctagagaccaatcaagggccaaaccttgaactttctcttaacgtcttcaatggtattaatagagaattatctctaaggcatgtgaactggctgtcttggttttcatctgtacttcatctgctacctctgtgacctgaaacatatttataattccattaagctgtgcatatgatagatttatcatatgtattttccttaaaggatttttgtaagaactaattgaattgatacctgtaaagtctttatcacactacccaataaataataaatctctttgttcagctctctgtttctataaatatgtacaagttttattgtttttagtggtagtgattttattctctttctatatatatacacacacatgtgtgcattcataaatatatacaatttttatgaataaaaaattattagcaatcaatattgaaaaccactgatttttgtttatgtgagcaaacagcagattaaaaggctgagatttaggaaacagcacgttaagtcaagttgatagaggagaatatggacatttaaaagaggcaggatgatataaaattagggaaactggatgcagagaccagatgaagtaagaaaaatagctatcgttttgagcaaaaatcactgaagtttcttgcatatgagagtgacataataaatagggaaacgtagaaaattgattcacatgtatatatatatatagaactgattagacaaagtctaacttgggtatagtcagaggagcttgctgtaattatattgaggtgatggataaagaactgaagttgatggaaacaatgaagttaagaaaaaaaatcgagtaagagaccattgtggcagtgattgcacagaactggaaaacattgtgaaacagagagtcagagatgacagctaaaatccctgtctgtgaatgaaaagaaggaaatttattgacagaacagcaaatgcctacaagccccctgtttggatctggcaatgaacgtagccattctgtggcaatcacttcaaactcctgtacccaagacccttaggaagtatgtagcaccctcaaacctaaaacctcaaagaaagaggttttagaagatataataccctttcttctccagtttcattaatcccaaaacctctttctcaaagtatttcctctatgtgtccaccccaaagagctcacctcaccatatctcttgagtgggagcacatagataggcggtgctaccatctaacagcttctgaaattcctttgtcatatttttgagtccccactaataacccacaaagcagaataaataccagttgctcatgtacaataatcactcaactgctgtcttgtagcatacattaattaagcacattctttgaataattactgtgtccaaacaatcacactttaaaatctcacacttgtgctatcccttgcccttctgaatgtcactctgtattttaaatgaagagatgagggttgaatttcctgtgttacttattgttcatttctcgatgaggagttttcacattcacctttagtggaaaacacataagtacacatcttacaggaaaaatataccaaactgacatgtagcatgaatgcttgtgcatgtagtcatataaaatcttgtagcaatgtaaacattctctgatatacacatacagatgtgtctatatgtctacacaatttcttatgctccatgaacaaacattccatgcacacataagaacacacactgttacagatgcatacttgagtgcattgacaaaattaccccagtcaatctagagaatttggatttctgcatttgactctgttagctttgtacatgctgttcatttactctgggtgatgtctttccctcattttgccttgtctatcttgtactcatactttaagtcctaacttatatgttatctcaactaagaagctatttttttttaattttaactgggcttaaagccctgtctataaactctgctacaattatgggctctttcttataatatttagtgtttttcctactaatgtacttaatctgctcattgtatattcctaccactaaattttaacctcttttatggtagagacattgtcttgtaaactcttatttccctagtatttggagatgaaaaaaaagattaaattatccaaaattagatctctcttttctacattatgagtattacactatccatagagaagtttgtttgagacctaaactgaggaacctttggttctaaaatgactatgtgatatcttagtatttataggtcatgaggttccttcctctgcctctgctatagtttgattagtcaacaagcatgtgtcatgcatttattcacatcagaatttcatacactaataagacatagtatcagaagtcagtttattagttatatcagttagggtccatcaaggaaaggacaaaccattatcagttactcaacctagaattaaatacagctcttaatagttaattatccttgtattggaagagctaaaatatcaaataaaggacagtgcagaaatctagatgttagtaacatcagaaaacctcttccgccattaggcctagaagggcagaaggagaaaatgtttataccaccagagtccagaaccagagcccataaccagaggtccactggattcagtgagctagtgggtgctccttggagagagccagaactgtctaatgggggcatcaaagtatcagccataaaaaaccataaaaaagactgtctgctgtaggagatccgttcagagagagagagagaccagaaataatcttgcttatgctttccctcagccagtgtttaccattgcagaatgtacatgcgactgaaagggtgaggaaacctgggaaatgtcagttcctcaaatacagagaacactgagggaaggatgagaaataaatgtgaaagcagacatgaatggtaattgacagaaggaaactaggatgtgtccagtaaatgaataattacagtgtgcagtgattattgcaatgattaatgtattgataagataatatgaaaacacagaattcaaacagcagtgaactgagattagaattgtggagagcactggcatttaagaatgtcacacttagaatgtgtctctaggcattgttctgtgcatatatcatctcaatattcattatctgaaaattatgaattaggtacaaagctcaaataatttattttttcaggttagcaagaactttttttttttttttctgagatagagcattgctatggttgcccaggctggagtgcaatggcatgatccaggctcactgcaacatctgcctcccaggttcaagcgattctcctgcctcagcctcccaagtagctggcactacaggcatgtgccaccaccatgcctggctaattttctatttttagtagatagggggtttcaccatgttggtcaggctgatctcgaactcctaacatcaggtgatccaccctcctcggcctctgaaagtgctgggatcacaggcgtgagccaccacacccagccaagaatgtgaattttgtagaaggatataacccatatttctctgaccctagagtccttagtatacctcccataccatgtggctcatcctccttacatacatttcccatctttcaccctaccttttcctttttgtttcagcttttcactgtgtcaaaatctagaaccttatctcctacctgctctgaaaccaacagcaagttgacttccattctaacccacattggcattacactaattaaaatcgatactgagttctaaaatcatcggggattttggggactatgtcttacttcatacttccttgagatttcacattaaatgttggtgttcattaaaggtccttcatttaactttgtattcatcacactcttggattcacagttatatctaaactcttaaatacagcctgtataatcccaattcccaactctgatttctaacctctgacctccaacctcagtgccaaacccatatatcaaacaatgtactgggcttatttatatagatgtcctataggcacctcagactcagcatgggtatttcacttgttatactaaaactgtttctcttccagtgttttccattttagtcattagatagctacttgcccattcaccaaggtcacagattaaaatcatttccctacctctaatcaacagttcgattctgcttcaatttgtccctatctattaatcaccactcttactgcccagtcaggtcctcattgtttcctgaacaagagtagatgctattctttccacttttagaccttatcctggctggatgcggtggctcaggcttgtaaacccagcactttgggaggccaaggcaggcagatcacttgaggtcaggagttcaagaccagcctgaccaacatggtgaaaccccatctctactaaaaatacaaaatcagccgggcgtgtggtgcatgcctgcagtcccagctattcaggtggctgaggcaggagaattgcttgaacccaggaggcagaggttgcggtgagcctagattgcaccattgcactctagcttgggcaatagggatgaaactccatctcagaagagaaaagaaaaaaagaccttattctgttatacaaatcctctcaatgcaatccatatagaataaacatgtaaccagatctcccaatgtgtaaaatcatttcaggtagaacagaattaaagtgaaaagccaagtctttggaattaacagacaaagatcaaataacagtcctcatggccttaagaatttacctaacattttttttagaatcaattttcttatatatgaattggaaacataattcctccctcacaaacacattctaagattttaaggagatattgatgaagtacatcatctgtcatttttaacaggtagtggtagtgattcacacagcacattatgatctgttcttgtatgttctgttccattctgtattcttgacctggttgtattctttctgagctccagatccacatatctaagtacatctttttgcattttacaagagtgcatacaatacaatgtatccaagactgtatttctgattttatcgtaccactaaactcacaaatgtggccctattcttgtgttcacgactgacatcaccgtcatggtccaagtctgataatagaaatggcattgtcactttcttccctactgcaacagaagcccagctatttgtctcccattttctctacttctaaaatacatttcttcactaagtgagaataatcttttaaagacacaaatcaaaccatgccaccacctttcttgaattattcaatatctttcgttggcttccaggttacagaaaaataacttgtaacaaagtttaaaggtcattcatggctcctctctaccctattttataacatttccccttgtgatcagaatctcaggcacatcatccatctttctatatacaaataaagtcatatagtttgaactcacctctggttacttttaatcaaccaaatgctgtaaaatgcatttgtatcgctacgtgttaagcagtagttgattcttttcatttctgtgtaatattctattctttgactataccgtaatttatcaattctactgttggtaagcatttaagtggctaccggtttgaggtttttatgattattgctgtcataagcatttctatacatgtctttggatacacacatgcatgtgtttctgaatatctaaaaatgtaattgctaggtaatagacttatcaagcatccagcatttgtggatactattaaaggttttccaaaggggttatactattgtacagtgtcaccaacagagtttgagtttctattgatccatatcaccaccaaaatttgaactgtcagtcttatctcttctcttgtctcttttttcctcttttttttccttcccttcccctctcttcgtttcttttctctcctcttctcttctttcctctcttcccttccctttctctttctcttccctatcccttctcctctcctctcccctccttttttctcctctcctctccattatttatttttccttcttctcctccatcccttccatcctctctcttcccctcttccttccttcctttctccatttcttcctcctctttccttcaatccttccttttggatatgctcatgggtgtgtatttgtctgccattgtggcattatttgaattcagaaaagagtgaaaaactactgggatcttcattcctgggtctaattccacatttttttttaagaacacatctgtaaaaatgttctgtactagcatattcccaggaacttcgttaaatttaatctggctgaatatggtaaatctacttttcactttgcattctttctttagtcataccataattttaaacattcaaaatatttgtatataatatttgattttatctgtcattaaaatgttaaccttaaaattcatgtttccagaacctatttcaataactggtaaataaacactattcattttttaaatattcttttaatggatatttatttcaatataataaaaaattagagttttattataggaagaatttaccaaaagaaggaggaagcaagcaagtttaaactgcagcaatagatttgtccattccaacctctcaaaattcccttggagacaaaaatctctagaggcaaagaagaactttatattgagtcaacttgttaaaacatctgcttttagataagttttcttagtataaagtgacagaaacaaataagttaaactctaagatacattccactatattagcctaaaacacttctgcaaaaatgaaactaggaggatatttttagaaacaactgctgaaagagatgcggtggggagatatgtagaggagaacagggtttctgagtcaagacacacatgacagaacagccaatctcagggcaagttaagggaatagtggaatgaaggttcatttttcattctcacaaactaatgaaaccctgcttatcttaaaccaacctgctcactggagcagggaggacaggaccagcataaaaggcagggcagagtcgactgttgcttacactttcttctgacataacagtgttcactagcaacctcaaacagacaccatggtgcatctgactcctgaggagaagactgctgtcaatgccctgtggggcaaagtgaacgtggatgcagttggtggtgaggccctgggcaggttggtatcaaggttataagagaggctcaaggaggcaaatggaaactgggcatgtgtagacagagaagactcttgggtttctgataggcactgactctctgtcccttgggctgttttcctaccctcagattactggtggtctacccttggacccagaggttctttgagtcctttggggatctgtcctctcctgatgctgttatgggcaaccctaaggtgaaggctcatggcaagaaggtgctaggtgcctttagtgatggcctggctcacctggacaacctcaagggcactttttctcagctgagtgagctgcactgtgacaagctgcacgtggatcctgagaacttcagggtgagtccaggagatgcttcacttttctctttttactttctaatcttacattttggttcttttacctacctgctcttctcccacatttttgtcattttactatattttatcatttaatgcttctaaaattttgttaattttttatttaaatattctgcattttttccttcctcacaatcttgctattttaaattatttaatatcctgtctttctctcccaaccccctcccttcatttttccttctctaacaacaactcaaattatgcataccagctctcacctgctaattctgcacttagaataatccttttgtctctccacatgggtatgggagaggctccaactcaaagatgagaggcatagaatactgttttagaggctataaatcattttacaataaggaataattggaattttataaattctgtagtaaatggaatggaaaggaaagtgaatatttgattatgaaagactaggcagttacactggaggtggggcagaagtcgttgctaggagacagcccatcatcacactgattaatcaattaatttgtatctattaatctgtttatagtaattaatttgtatatgctatatacacatacaaaattaaaactaatttggaattaatttgtatatagtattatacagcatatatagcatatatgtacatatatagactacatgctagttaagtacatagaggatgtgtgtgtatagatatatgttatatgtatgcattcatatatgtacttatttatgctgatgggaataacctggggatcagttttgtctaagatttgggcagaaaaaaatgggtgttggctcagtttctcagaagccagtctttatttctctgttaaccatatgcatgtatctgcctacctcttctccgcagctcttgggcaatgtgctggtgtgtgtgctggcccgcaactttggcaaggaattcaccccacaaatgcaggctgcctatcagaaggtggtggctggtgtggctaatgccctggctcacaagtaccattgagatcctggactgtttcctgataaccataagaagaccctatttccctagattctattttctgaacttgggaacacaatgcctacttcaagggtatggcttctgcctaataaagaatgttcagctcaacttcctgattaatttcacttatttcatttttttgtccaggtgtgtaagaaggttcctgaggctctacagatagggagcacttgtttattttacaaagagtacatgggaaaagagaaaagcaagggaaccgtacaaggcattaatgggtgacacttctacctccaaagagcagaaattatcaagaactcttgatacaaagataatactggcactgcagaggttctagggaagacctcaaccctaagacatagcctcaagggtaatgctacgattaaactccaacaattactgagaaaataatgtgctcaattaaaggcataatgattactcaagacaatgttatgttgtctttcttcctccttcctttgcctgcacattgtagcccataatactataccccatcaagtgttcctgctccaagaaatagcttcctcctcttacttgccccagaacatctctgtaaagaatttcctcttatcttcccatatttcagtcaagattcattgctcacgtattacttgtgacctctcttgaccccagccacaataaacttctctatactacccaaaaaatctttccaaaccctcccccacaccattttttatatttttatatttttcttatttatttcatgcacacacacacactccgtgctttataagcaattctgcctattctctaccttcttacatgcctactgtgcctcatattaaattcatcaatgggcagaaagaaaatatttattcaagaaaacagtgaa

SEQ ID NO: 846 - DNA, 238508 bp, Homo sapiens
  source 1..238508: mol_type = genomic DNA
cactgtagagaaacgcacaaacacacaatacacatccacttaaatatgtcttcacatgggtatattctatgtacatatgtacaagcatacatacaaaacacagtctgttaaatcagagtttcatcgcaaaatggaagtgtaaacctaagaaacattcacagtattttcctatcaaggaagtaaagaggtcttgatgggggatacctaaaagtggctgtggtgtgtgtttagatgtcagagactcagtactgggagagagggaacctctacttggagctcaggatattttgatcagcctgtgtaacttagagctgctagcacacggtttaaaggagataaaagcagcctttgggaaaacatttattctagcgatttaggtttcaatgtttaggtggagcacaaggttcctgatatgatttggctctgtggccccacccaaatctcatcttgtagctcccataattcccacctgttgtgggagggacctggtgtgagatgattgaatcatgggggtgggtctttcccatgctgttctcgtgacagtgaatgggtctcacgagatctgatggttttaaaaaccggagttgctctacacaagctctctttttgcctgctgccattccagtaggatgtgacttgcttctcctggccatggttgtgaggcctccccagctatgtggaactgtaagtccggtaaacctctttcttttataaattgcccagtctcgggtatatcttcattagcagcgtgaaaacggacaaatacagcttcagtttcccctcactccactccccattaggggatagtttttgtccagattaaagaaaaacctattgtttatggtggtgctaggggaaatgaagaggaaagtcttgcctctccattttcttccgttcatgaggtgagttctctgggtctgcctctgactggggaagatatacattgaaccccaaatttccatccttggaagtccagataggtctgaggaaaaaaacaaaaaacctaatagcaatgttactgcatttatctgccttccatttgagccaaagaaaacctgagggtcatatgaagtgaagtcctgttaattggaaggccaggtgggtctgaggaaaaaagcaaaaacaaaacaaaacaaaaaaacacctaatgggaagaaatgttactgtttttatctgcctttcatctgggccaaagaaaacctgaggctcctttgaagttaagccctgctcatcagggaagacaccaggtgaattgggtctaaaagtcttagctagggagaagagtgttcatttagtggataattctcttgccataacctcttagagctcttcacaattgactgggtgcttggaatccttgctctagcttcattaaagagtaaactcatcagcctcatgcctggctccaaggtggtgaatccaggaggaggaggcttctggggcagggagggtcactgtcttctacctagcagctaaggtagggcctggtacgtggaaagtgtgcaatcagtgattgaaggagtgttaaacaatgagtgactaagttagaaaacaaatgaggaagtgactggggacactggatagatacaaatcaaattaaagatgtcacaggaccaaagcttgtgcttgggaaaataaaggctatgagaattttagggggaggaggtccctgcaggctgatgttgctgaaagagcaggcctcctaggacttcccatctgctgtccctgttcttacactctatcagccatggcccaagatcaaatctgagttgtggaaggacatgacaagggggttacacaggtggcgaagagaagatagagtcacagagttttggtcatgctgggcctactgcatggccctttccaaagaaattgtactctttcttcagaccaagagatttgctagaaagcagaaaaacaagccgtgttaaagtctgcaatactgagagctgatgtggataacaattagctaggaaagtagacggcagttaaggagaaagttatccaaaccataaaaagtgcttttaagcatcagtgttatttcttttttttctttaaaaaaacaaaactaatatcttcatcataaacacatgcccatattttttttctatatgttttagggcttcattacttgtatttatttaatattaattttagctaacacttattgaggctttactatatgtcaggctctgttccaagcttttaccatcggattccacacaatagtcctttagcgcagatattagtagtatccctagtttatggatgagggcagctgaggcaaatgaagaggggaagtacatcacttaaagctataaagcacttcatattacagccaggattagacagtctaattccagagcccatactcttaatcactgcaataaatcaagttaatttaatttatgctttaatccttacccctcaaaaagtagagcagggcagaatttgtgatattgaaatttttacccccgagtcctgcgagtatctacactagactgaaatgtcgtcattaccatagcctacatatgcatagatgtttttgtttctttgctttttattttatctaatactacacttcctcaattattttaactttgaaatatttaatgacaaaaagaataatgcctgacattgcaagataccattggctaattttgtctatttttccaagtacactttatagcagatgtcaaatttcagaaaaggccaaatgagattttgattggctttttattataaattggaacatgttgaggaatttgcaataggcagtctttccttttaaaatagggaatatttctatttaaactttatttctttgtaaaaaaaagtgtagtttcttcaaataagctttacgcatttgggtttatttacacgtgacattttttgattgttattttgaatgacagtttttttcattatattttctgggtgaattagactgtgatgaaactgtgctattaccagttgctgtgttattacttcagatctttgttaatagatgctcatgcaatcgagtgtatgcatctttgataaatagttgcaaagcctctactcttctaataatttgtatgtatgtaagttgtacataagataggtaaaataagaatatagaaaaattcactacacagatagcactaccaatactatgatgtttgtacttttatatattttaatacaactatgattgtactgtgcatagtttcataacctacctttttaacttggtaatatatcatgaatttttccaagttattaccctttgacactcacagttcaataaatatttcctgcacatattgtatgtaagaaatgatgtttggtgctaggaatacaatggcgaacaagattagatatgtttcctaccctaaggagtttaaaatatagtggcaatgacatatttcagttaactcttaaagagatctcacggaaaactaggcactgttctatagcctttgcatatattcatttatttcttacagaaaccctgtaaggtaggctctataattacacctatttttacaggtaagtaaactaaggcataagaaggtaaagtgtctagtccaagattaggtagcatgtgaaggaatggttgagctggagttggaatttgaaccggtctttctagagaccacattcttctctcacttctattacacaaatgattattggtttataattacaacaaatttcatgcaggaaattgctagtgcatatggcaggaggagggatgtatttttagaatgatagaatctctgtggaggaagtatttatacagagatttgaaaggtgaaaggaagccagacattcaaagagctaggggaaaaatgtctcatgcaaaggagaaaggataaaagagaatcctgattttgactggagctcgatacattcatggaaaaatttaaacaaggccagtgggtctggagtacagagaatgagagggagagtgcttcaaggtgatgtgggaaagacaggtgagtgcaaggtcaggaaggctttgtcacccatgtagagacattgattctcaacttacacagagaatgaatgagagagtgacaagcggagaagcagagccaatctgaagacccctgtagtcattcaagtgagagatggtactggcttagaatagggttcctgacgtgtgtatgacaagaagtggacaaatgagaacatattttggagatagaatttacaaagctttctgatgagattaaatgtgcaagattaaagaaagggagaaattcactcacaggtgggagttgaacaatgagaacacatggacacagggcggggaacatcacacaccgggcctgtcgggggttgggggcgctgggggagggatagcagtagaagaaatacctaatgtaaatgaccagttcatgggtgcagcaaaccaacatggaacatgtatacctatgtaacaaacctgcacgttgtgcacatgtaccctagaacttaaagtataataataaacagggagaaattaataagcaaagaagaaaatatcacacaatggtaaattctgtgcatataatcaaaatatagtgataggatagtgaattagtgagaacgtgatctgaataattaaaagggacaatcttgttataaagtcttaggaaacagctactgtggcagctttaagggtaagttgggcgcttggtgtgttctagaaggagaagagaagccagtgtggtcaagcttcttagacaagaggaaaattatcagcaagaggaagtcaaggaaacaggcaggagtgcaactatgggaggctttagagctagtcaaggaacttggattttatcctgagtataataagaaggtaacttttgctactcccatcaggattttatttgatttatttaaataaacttttaagactatcgtaagccacatttagcccgaatctactcgaaggacacaggaaacaaagcaaaaatcaccagtagggcagaatcaggcattcctcttttggtgggagttcttattgtagcccaggcataggttagtatagccacccagaagtcattttctcccaggtgtaaggagtcaaaatctgtatcaggcaagtcagagagaggctgcaggttaagtcctggtgccccatagtagctaacaggcttttcagccctccatacacctatgttctagactctgcaagaaatgccttattataatttccccaaactcagggctgcccaaactatggaatctccaacaggtatttatgattcattataacttcttcccattcagacaagtttgccaatcaagggtcatttctatcacaggcaatgctgcctagtgtcaacctaaaataatggcagagagacaagcttcccaaataaattactttgttcaggaataaacaggactataacctgggatatgcatgctatgacagatcataggcatattcagggaggtggaggcaagggaaacttttaaaggcaaaaaggagaagtatatgaaggtcgttttgaaacaaaagttcattggtcataggggcttcccacagttggtgacatgtgcactgaccatagttaggagtgggtcttcatagaagtgacatgactacagggttgtggtttagtaaagctacttgcaaggccgcaattaggactattactggaaagatgtcctcgtcgaagcggcttaattgcaaggtgtggttttggcagagtctcttatgacagttcttgttatcaggcaaatatacatgaggaccctccttttatgaaggtcccaaactaaatggatcttctggctccatttagtttgattttgacatgaatgactccattttggtaccgacagttttcacactagcaatataattggtattttacagttgtctgtttttcagggaaacagagccagtaagtttaactgaaaatcagattctcatgcaacagaggagttttgttaatccttttacttatatacttcagatcacatagggcactatggtctgagatagatattagtgagcatggtgatttagaacggtttcaagtagctttcagttgggtttactactgcaagagcaaagaagcagggcaaaagttatgtgaaattaaatacacagaagagtaggtgggcgtagatccccattgcttccataattctcacaaaggtgcacataatttggtcactgtgtcctttgcaaaatggtctagcaggtcaaagggccgggattgtgagctcactgtctcttatacccctaggctaggcagggatcacatcagcactctagagcctatttgccaaaataaaaggcaattctttgcagagtagattacatattccatgttctcattactgtattatcaggaccacgggagtcctagtcacagatgggaatttaattaagatagtgaaatgaactcatttcccttggctgttaagttggcagtgggtggtgagggcaagagtggaagctgacaagctagtacttggatctgcagaagtccagggaagagattgtttagacttgtgtcataacagtactgatagggtgatagattcaggacatatttttaaggcttggtagaaagggcttgctgatggaattaacatgggacagaaggctttttgacttgtgcagttaagaggatagtggcctttaagaaggagaataactggaggaagacgcttttcagaggaatataaaaaatactgttttgaccctgctagttgaggtccctgttagacttcaagtggagatgacaagtttaagttctgggcatattcagaggaatataaaaaatactggattatttgtctaacccagtgatgtagagttgctgttcctaagtatctgtgggtgttgctgaaagccatgaatggtatcatccaggtctactgtgcagacagaaacaagagtggggcccagagctgatccaaatttataaatcctgttttcataaattcacagagatagaattattcacagaaataggtcaaagagtaaccaaaggcttgagcttaacaatttaaatgctattttgaatggctgtactatcatatctccacattaaaacaggatagggaggcactggggccaatttttcatagacatcatttaagaaaacctaggtcagaaggtcaagcagttgaactttgtgccctgtcatcccctaatttccctgtcaacttgaacttcattctagaagttcagtccctgcctttgcagccttgtactttcttggaaagttttatgttcaaatgtgtcccatgtcggaataatagctccctgacctgtgggacaatctatgattaatgcatcccaggagagtacatgcccttcatctggcctccagcccttattgaatgggggtaagattgaaaatttataaagataggataaggcctgtggcaaaacagaaactcatttagaggcttattggtcagactggaatttaaagaggagatttttcaggaggtcatcatgtttgtctattaaatctgttacctgggacctgtcaggaacacgaaagttctattgaatgcctttcccaaggacccagcatgcatggtgtatcttaagaagtaaagggtgtatcttggttacaattagtaatgtctgtaactctgaagggaatgagggttttggcaaggccttgtattgtgaccttggtatataaggagacatactgaaactaatatcgttttgacttacattttgggtatattcgtgagcaagagattctaatatgttgatttttttttaccttgaagaagacaatttgtaggtaatggcccaataatttataatacatatgaagacaggaccatttgttggccagggcatccagtgttaaggtgactgccttaagattaagattaagtgtgatgtttcttgggtcctgtcctttgttagggacatcctggctaatggatggaaagcagcaacattccactaagctctatcacctgtcatggttagcagtgccattggcatagtccaggaactaccactgctgttcactcagctaatcccaaggatcgccaaagatagctaaggggtttagggaagggtgacctcctccagcaccatggcatttggcaaggaactgagaacaggggaagctacctcttctgctggtggaatatcctatagggctcaagtttggttccatactgtcttagggaggcctcactagctgtgccaaggttgtgaaggttagtttttaaaacccaaaacataatgggcaggtgggagtggaagaccacatgctaagagtttgtaagagcccctatttcctggagagtccagtaggtaaccagtcattagttgtttcatgccattaataaacgtgtcaaatgcatttccttggaagaggatactatgaatgtgatgtcatacctatgctcctggagaaaggtgtgtatagttaagagcctctctgctaagactgtgtgtgatggcaaagctgctgagaaactccatgggtagctggcaaaaggtgtattgagttcttttgaaggtggaggcaaacgtggtgagagattgttaaaataggagtttagccacctgtagttgtctttatgttctgtctttgactgacaagagaaaaaggaagggacccagtgtctctaggcagcaaccttaaccacaggatactcagtccttctacccctcaacttgttttttatttttaatctctgttttctttgaatgcttacctgaggagatcctggtagtcccaagtgttctgatggataccctctctagagtgtcccaatcaaccttagagagcctgggggtctacatcaccaatagtggactcaattttgtcttttaaattatttattgtttgacaatttatttattttgagacggagtcttgctctgttgcccaggctggagtgcaatggagcgatctcagctcactgcaacctctgcctcccaggtgcaagcgattctcctgcctcagcctctggagtagctgggattacaggcctgcactaatttttgtatttttagtagagacgggcttttaccatgttggtcaggctttaaggaagagattattaacatgtcaatatgtaccagcacttaaaagtactcaacgcatttaccaggtgaagtgtaatttacaatgagctgagaaacatcttcaagtgtcttaggagaaacaagatcaaagaattccttctcctctctttcctttcctctctctttttttttttttttttttttttaaacattgattcaccatcttctgtggatgggatctgtgatagcccatggggttggagaccaatgagcaatggctacaaggatgcagcagagaaggtgccactggtcccagcagcattgactctaatgaagtgctgtctaggactatcctcgggaggaggaccatttgactcttggagggaggagagtgaattatcttcttctcccaagtgctattgagagcaggcagcatcacgtacgtctactgcagcctactggctccctcagctttccagctagcattcagcaatatatacacccatgaccctatgatgggggaaactccacttctagtgtcaggggatattcctcaaattataatcactcaaaggtgcactgaaaaacagccaagtcacatggccaattcaaaagaggctccccctcttgctgggatcaagttggaatgcagtatcctggagtgtgttatcgggattgggacaggatctagactttaggaaggggattcttggcagtattcagaagaggtaatacaaagccatgcaaggcagtacacaagaatgtcatcggagtagaaaggcctccaaaacagtagagccctatgtagttaggcaattaaaccatgagcggtgaaagggcatctctgagggacatttcactggagtttggaatgatcgcatttttgttgccaattcaaatcattacaacaaggcatggaaatcacactcagaaatgcataagagataaaaatttataatcacagtttctagagggaaccagaggcatgccatgcaaggggccctatgagaagaactcctagggaacaggctccatcaagcaggagagccaagagagaatgtgaacccatgggcaggtacctccattgagagtcaacgtggactacacaagcaagaagcatgaggggattttactggtacatttgaatatcactaggtcacaatcagggaaggcaagaagaggaacttgtggcaggaaccagacttatcacaccggtgtacctggtaacttggtgaggggtgggttgctcagagtctgttcatggagaggttaaggtatcaggaacatatgaagttaaaaaaaattgcaatatgccaccctgctacgctgtattttgcttacaaattttatggagaataacttttctatctcttcactttcagcctatgcgtgtccttaaagctaaagtgagtcttttgcaggcggtatatagttggatcttgttttatccattcagtcactctatatgttttgattggagaatgtaatctatttaatttaaagtgattattgataggcaaggacttactatcattattttgttaattgttttctgactgtgttgtagctcctggttcttcctctcttcttgttttcctttttgatttgatgatttcttttgtagtgatatgcattgatctctttatttttgtcttctgtgtatctactacagatttttagtttgtaattaccataaagcttgcataaaacatgagtctattttaagctgataacctaagttaaattgcatacaaaaactctacatttacttacttctcctcacctacacattttgtgttactaatgtcacaatttataacttaatacactgtgtatcccttagcaaattatcatatagatatttttaaaatttgtttttttaacttttatactaagattaaaagtgagttacacattaccattacaccattattctgatgttgactttatacttacctttaccagtgagtttcatgctttcatacatttttatgttgctaattatagtcctgtcatttcaacttgaagaactgttttcagcatttcttgtatggctggtctagtggtgatgaactcgttcagtgcatccactcttgaatatttttctccactgtagtgctagaacctctcatctggactccagggctcccacaaaggtattcttgtttatgggtagttggcaaaattggtgtttctctagggggatagcagctggaaacttctacttcattatgttgctaatgtcccttctgacagaaggtttttctggataccatactttctccagtggtatgtttggagttgtccatatcacctgctgttaaaaatgtccctgaacctttggtcagccctgacagacctatctgttctctgtttctcaatccagttaccaacctgaccacaagatgtaccaaagattttttgtattgaaataataatatttaataaacatctgctctgtgccaagcattttggcctatactttataggaataaactccttaatcttcaaaataaatctttgagaaaatatcatttcatacatgatgaaacacagtcttaaaaagggaaaatgacttgttgaaggttatgaagtgatggcagcgggatttaaaccaggcttgtttcactccagaaagtccagaatccttttttatattccttaaatagtttattggcaagttgattattgttactttattttataactctaaaaggaatatatacacgacgtaaaatattcagaagatgtcagctcctccagaaagataaagtatggttcctgtgctgaatgaagaactcagtgggtaatgtggacggagctcctgccttaagagagacaagtatgtaagtggactgggaaaggccgtcatgtgatgcttgggaaggagacattcaggtactgacaataaagtccacagaggaagagacaaagaaatggttcacctcaaagtctatgagggggaaaataatgcctggaaccatgagacatgcaaacgtggttctgaataattgttacctggaataatgttatttcttgccacacattaatgcatttgctaaaacaaagccagaaactttaatttggatatctgattccactggggatgacccaatgggaattttcagatgaattggttttgctagcaatacttgtatggtagaagttatgctgagtctggctggctgacagccagctatgaggctcagtctgtgaagtatccgctggctgggaagttctttcaaactcagaaattacaaagtatcaagtcttaatattggttgtatcctagatatactggttaaaacaaattacaatgtaaaaatatatatgaatatatgataaacaaggtaattgcagagggatctaaatgttcatgtcacttatgtctaacatcatcttctggaggtgtcattctaggcagccaaatcctaattttttagtcattgaaaattctagaatcagaaaagttaagtatatggtagcaattaatggtttaaacctaagatagtctgatgcatccaccaccataaaaataattgctgcagagatatgactttaccctagggctcctctggcctggagtggtcaacacagttctttggagacttactattttctgcttttacagttgaaatatattttctcctaagtgacaagtttccttgtcaggtatattaataccttaaatctaatagttgttaagtttaaccgacctagactcaaactgttaccttcttatgatttctcatgtctcagctctgattctcggagttgagataattctttatttatctgagagaaactttataagttcttggggaaaataatgtctttttagaatggtatagatagatttctcaaacttgagaggggaacatgatgatgactttttagaaaaaggcagatcgatttctcaaccttgatatggggaacatgatgatgtctctttagaatcaggtagatcgatttctcaagcttgaggtctcagaagtgcaagctgccttcagaccccagtgagatggggtggactaattatacatatcttcattctgttcctatatgaacaaggactcgaggccttggctgggccatggccagtgtacagcaatttagtggaagataggtgactgaaatcaatatttcctaagctagctcttaggatcaatgtcttttccattcagccatattcctttatcaaactcaaacggtaggatttttcaacggtggatcagactgatgttaaacatgtttccagataaagacattaattttgtttctgttgctgtttaaagcaaataacaaagagagtctggctgggtgtggtggctcatgcctgtaatctcagcactttgggaggctgaggtgggtggatcacttgaggtcaggagttcgagatcagcctggtcaacatggtgaaactctgtctctaccaaaaatacaaaaattagccatgtagtgggatgcacctgtaatcccagttactcaggaagctgaggcaggagaatggcttgaacctgggaggcagaggttgcagtaagtcgagattgtgccactgtactcccgcctgattaacaaagatgtaggaaccagagctcttggattccagagttggtaatcttggctctatgctgctctgtagtcagaatcaatcaattcccttggaacaggtgaacagaaagtgtgtcttgtcttgcctttacacagagaaagggaccaattaagttccaactctttgggaatttagagtctcagagagaaaaattaagagaataatctaaatcacaatgaagaaattatctattaatatatttataataagagcaaattgagtgtctctctgctgctgagaaccattgttagcacatcacaataaagtcaaataacatggagtgagatggaagaaagagaaaacagggtgagtttcttcagagctcagagggaagaatttattttttgtttttttgaattctacatatacaagaaaatgtgtgtgagtgagtgtgtgtgtgtgtttattttgtgagagagacagacttggtggggtgaggtgaattctggttctggagatgtgctatggaattggggagaacttggcagggtagttcttcagggccttaccagtgctgaattacttaaaattgaattaagagagtctccctcagcacaaattgaaacagctagacttggggataaaggaacaaatttacctaataggtcaagattctgaggttaagtcttctttgcaatttggcagttgcactgatttatgtgccaaactgtgaactcatttctcaaagtggtccaggagaaggactgtttaaggctctagcaggatcaggttcatgcagcagtctaaatgatttgcacatgctctagggctggtgacatctatctatactcaaaagctgaatttctttttagtgcataggtaaaaccatatttcatgcctttttagggaaagatgatgctgtacactgggattggtaatcagggaagtttcactttgggaaattctgcctttctgtgttagtcatttgcattgctttacttcaaacttcagtaacaattgattgagattgatccatcactatttcagtggagcctgacttatttgtaagggctgcccgtgtcttcttatctgggcctggcttttgaggccccctcgaaatgtaatcacccccagcttcctcaagctctttcagtaatcctctttgctgtctccttcctgcaccattgcctggtacctcctcctcttccaatctgttccacccctctgatcattctcctctgagcttctctgggccaagacatgactgtccctgacctgtgacagctccttgtgcatgaatttacctccacaactgaactaggagctctccatggccacagctgacacttaccctgttgtcttacccatgaacttgtgatactttttcttgtaattgcttttctaggtaaaaatactcttcgtcatgattcttgtggatgtgactgtatctgaacagcctcagtgtaatatgaataaacaagaatcaaattactgagtacctactgtgtgccagacactgtgtagacatatattttcattaccctacacattagcataatgaagacagtatttattcattaaatcaactaagactatgatacataccagtataatctctaacacttttcccataatattttgagtgcttattaattatgtgcaaggcacagatgaaatgcctagtctgatgaagtattaaaatggttatcaattcaaaagcaaataaatgaacactgcagattaagccatgcagctataaaatctagcatacctttataaatttaaaaattattagctgaatactaccaactgccagcagtcagaattgaatgcttgctttgttcctgagattataataaacacttcactaatgctgagggcagtaaagtgggatgccctaattcttgcagctagtagataaggaagtccatggtcatctgcacacagatctcataatcttcccataataaaatactggacagtgtatgagatattgtcaataaatgccataaccttaggctattagtctccctgaatgacaggcttttaatttataatgcaaataacaacaatcatctctttgaacagttggaaggagatggctggacttatttatttcagaactgagattactaaagcattattattaaaaaaggaacttggatttggggctggctcccctgaattcttaataagggataaccttataactaaaaggaaagagacctcaaaatggatgagtgtgggaggagtgaaagaatatacagttgtattaagtaccagtcatatctctagcactttaaaaatattatagaattgttatcacaataaccctgtgatgtgaggtaatgtaaaaaaagttttatataagtgtctttactagtaacgtttagagaggttacataacttcctcattttatattcatttattgagtacatgttagtcactgtcttaatttttctaacttatttatttctcactacaacattcaaagttagatgttatttttatccccatttaacagttggccaaactgaggcacagaaacatttcaaacatgctcaaggtcacaagtagaggagccaggattcaaacgcaggcactctgactttatactttgtgcttttaaccaatacgtcaatattcaaagtggtggaattcagactcaaattcattccaaaccttttctttgtttttcacttggagtcacaggagaatattcctactcttaaatccagatgcctctgaagaccaggaattgactttctccttagtaagtcacagacacttttaagacaagtgtgagaatattatcacctttctggggtattcagagttccccaaggagcctcaggaaaatagtatgttcagtgtgataattgatagctctgattcatctggctattcctcttccttccagagcttcctgccatgtcataccattcctttcacatcatcactgtgtgtccatgtaaatgtatctagacagccatcctacacttttttttaaatctccaacttctgctcagcattcatattgaagtcttccccaggtgaagcagttttagaagtcgactccgaatctccttggttctagctccatagagaataggattgagtacaggaggcaccagcacatagagattagccagaaagatgtgcacatgcttggggacttcgtggtgaccaaagcggtgggtgaggaaggagaagaaggcagggatgtagaaaaccaggatgatgccaatgtgggagccacaggtactcagagctttgtgctgggcatcatgagatggaagatgaaagactgcatggaggataaagccataggaaatggcaatgagaatggaatccagtcccatggccagcagagccacagttagcccatagacaatattgacagtgatgttggcacaggccagtcgggcaatgcccatatgctcacagtatgtgtgtgtcatgacacggtgaccacagtaggggagtcgcctcagcaagaagatgaagggggagacaatagccacactacggaatagcccaacaaagccaattctgcctatgacagcatggttgagaatggttgtgtaccttaatgggttacagatagccacatacctatcaaaggccatggcaagtagaattgaggactccagagcatagatagaatggacacaaaacatctgggccaggcatccaccaaaggaaatctcaccagcatggagccacaaaatggccagcatcttgggcacagtggtagaactgagagccaggtctgtgagtgagagaaggcagaggaagaggtacataggtgcatgaagagcattgtccatggcaatgaccaggatgagggcagcatttccaaccagtgctacaagatacatggcacagaaagggatggcaatccagaagtgggcagcctccagccctgggatccctgttaagaagaaggtgtctggaagatggttatcactgaggttggaatctgacattcttcctggcaaatgaagggctctttctgaatagtattgttatgcttgccctgtaacatcagatatttggttgatttatgtaaaacaaagatctttctgtgaaataatcttttttagactaaaaaaatttgtttttcacttgtacaaacatctgaaatgactaccacatataattcattttaaaaccttctgctaatttctatattgaacaatgatgttttgagttctatatccaaagcaccaagctaagtatttattagtcttctcaaactgacctttccagacttatctccctccatatcctgcacatcatttattgacctctagtccatccacatcatgggatatttcttacctctcattcatgccttttctcttacctagggagtctcattcctttattttcctcctctctattaagttttaatacaagtttccctgcttcccagaggccttccctttctaaactggtcttggtaatctctaattttgtatttttcctacttccactatcttacaaaattctgctgggttagaactatgtctttatgcaaccgtaacctctacactgcccatgactgtatttgtacctagacattttgacaacttcaataaagactaaattctgatcattcttagtaacatggcattgatgttttaaattaatgatataatgatgcattaactttttttctgcatttgttatgtgccaaatatacaccaaatcacttttgtatatatatatcatctgaagtgcctatgaagaggctaggcaacctgaatatgctttcatatcatgattgaatatatacagcaatttgagcattcacatgggtataccagaaggaagtgtgaggtaaatcagatatgcttgttgaggatactgcactcaaccatgacaaagccagcgtatagtcctccaatccaccactataatggctggctgtgaggtcagatcagaatggcaagtgctattagagacagatataaaaagtgaggtattctggatttaccacccataaagggactggaaggggattctgttcttgctgtagagggatagctagtattatacacattgtctcagtaacatgtatccctaaaagaattctgagtagaaatgccaggaaatctgaattttagccccgattctgtaacattattgatttgtgactttgaacaaatctcttacttatctggacagtctcaatttagaaagggcaatgaatgtagtcattctctgattttctgtctgctcactatgtggcattgaaaaaaattccaaagcctttttgtggcttagtttttatctttaaattgggaatgacaccatctgacctaacttcacaaaattttgtggttgacaaaagatgactattcatggaattaaacatttgtatacccagaataattcccctattttttcctaaaaaaataagatatttatattttaacaacatatactctcgataaaagagagtacagttatcatttacatccctaaccaatgaaaagaccaatcccagagaagtgaactgatataatttagatcacgaggcattttatttgcagaactatgattaggtctcatgtcccttgattcagagtttggcgtttttgcctcaccctactgtccattaataagtccaatacttgaattcctatctctttcaaatgaggctaatatcttttttgtctaatatcaattcctagtgctgaagtatctttactcattatcttagctccaaagaggtggaattaggaagtcccctttatttgcattgagatttttttttttgtaagaacaggaggcatcttattgattcctaccataacagagcacctaggactgtaatacaaagaaacacgattttactgcagtaaagataactgatgaccgatggtgtttaggaagttatgagacaaaagatacagagcaaacaaaaagtcatgggcatcagccagtgcagggctgtgctagaggttcctatctagcccagacacttagctcatctgccttcctaccctctgctttggtttaaaatgcagaggagagactggaaacaatgatgaatgcaggggcggggatgcccattgtgtgctctgtagatgtcttaggcaaacttagaagctaaagagctgcttgtggctgctcaatctcagaagtgagtcaagaagtttccagagaagctctcccaaagcagagtcttacattttcgtgtcacatgcccccacatttcttccctctcctcctcctcaggtctccagtaacccaacagtatttagcggcacataccatggaccagtcactgtgtggaactggggtaacagcaatgaacaatcagacaaaaatccctgccgtgaaagagcttagattttagcaaaggcagataaatagcaaacaaaatgcagaagtaaaatatatgttagataatgataaggactttgaaaaaataaaacagaaagaaaaagaggtagtgggagtggggtaaattctaattagggcattgtattagtttgctagggctgtcaccacaaagcaccacagactgagaggtttaataacagaaacatattctctcacagttgtggaggctggaagtctgatatcgcgatgttggcaggtttggttctttgtgagtcctttctccttgccttgtagatgacccccctttgtgtcttcagttggtcttccctctctgcctgtgccctcatctccccttgttaaaaggtcaacagccatatcggattagggcacatcctagtgaccacattttttaaaaaaactatcacatctttaaagatcttatcattaaatacagtcacattctgagatgctgagggttaattaagaccttgacatatgaatttgggggtgtggagaccaacacaattcagcctgtaacagacatccagggaaatctttgctgggaaggtagtatttgagcaaagccttgagtcaaaagagctagccatgcagatctcagaaggaagaacatttcagacagggggacagcaagtgcaaaggctttgagacataggcctgcctgatgggtttggaagcagcaaagaggcttttgtgctggaggactagaagtgggggtgcaaggagcataggcaagataggctagatccttaggccacagaagggactttgactttcactctgagttggagggggatccttaagggagaaatcacattgctggtgatctgcaagttcaggctcaaattcattgctcagcccaagcagagtccatcaggtgcttatgctgacggcaccagggatgcaaggctgaatagctggagaaacaattaacacattttttgtgggaaagatacatctatttctagagctctcactattataacttctgaacgttgcctcaattcttgatattattactgttaaccttctttttgatgcacttagaaaacgtgagaggaaggttatttttatgtcatatgtgctttggtaaaattttgcaggatttgtgtactgtgtattcttttatcctttttcttttgctgggctaagagtgaaggggagaacagcagagatctaccttccatcacctttggtggaggggtgctatgatgggaaatctgcttctgacttattcttttgaaatcatagttagggtaccatattctttgcaggttatgtagatgatgtacttttcattgccagagaaagagtagccaatctgtataatgccagtttgtcaaatctgaaagtgctaaaatcaaccaaaacctataaagctatgaagaatattgatactgtataacatgtattggagcataaaaacttttttaaaaggcaggtttattctcacattgcccataataatattttgaaataatacatatgtaatgtttgtttatttagccagaggcaagttggtactgtggtaataccgtcgggtttgttgttcaaagacaagggccaaggcccaggtttgctacttcctggctttgtgtccttgggcaggtcatttaacctctcccattggtaaaccgaagaagacaagtcctcctctacttctgacagaagtattgggaagatcaagtgaacacatgtctttgtggagtactatataaaattagatattatcataatgcattgcactgatattttttagtgatgacactagatggttttgggctcagcattggcactgacctgtgttaataggggaaacaagcttggacgacagagtctagagagctggaatcactaccatcttcttttctcctttctttctggcctattcttgccctctaagaaagctttaaaataactgttgtaaggtaactgctactctgtgattatctaaggatgtgtggaccagaaagattgaggcaggagcaggtcccatttatttccctttagaaaacagtgggaaaacgatattgaacttgagtatcatttaggttcacaatacaggcacccttcctaacttgttgcaggatcctgtgtctgggtccccatcttacacctagatgtcagtaacttagctgtgagttcattgactgaacatattgctgaggaatctgatttcaagaacttacctgcacaagagacatgagtttgcaggtggagcatgcagaagttggacctcggtgtaaaggtgtgtgtatgagggtgaaactgtgtgggagaaagagtgtggtggtgcagtggctttggcaggaggtgtgtgtctggatgcaaagttttgtttagggaagtgaaggctgtgtttctctgcaggttcaagggagtatggtatgagagagtggagggtctgaatgtgtaattcgtgttgaaatgtcttgtcctttctcagttttctgggctaatgtcttcagttcagctctgtatttctgcctcctctagtcaaggggattggtaaacggggttatttattgactttctgtgatgtgcaggtgggaaaacccaggtggcatcccctaaggatttgatctgtggtccatctattgagggaaagataagaagcagttgataattgagaaaaaaatgagcaagggaaattttccagtgagttttcaagggaatttgaaattaaacagctagcctgtcttttcctctattctgatctctttttcacttctttccttgtcttccttttctcttctttttttttttagctgtactttctactctttcttttcttttcttttcttttttttttaattatactttaagttttagggtacatgtgcacgttgtgcaggttagttacacatgtatacatgtgccatgctggtgcgctgcacccactaactcgtcatctagcgttaggtatatctcccaatgctatccctcccccctccccccaccccatcacagtccccagagtgtgatattccccttcctgtgtccatgtgatctcattgttcagttcccacctatgagtgagaatatgcggtgtttggttttttgttcttgcaatagtttactgagaatgatgatttccaatttcatccatgtctctacaaaggacatgaactcatcattttttatggctgcatagtattccatggtgtatatgtgccacattttcttaatccagtctatcattgatggacatttgggttggttccaagtctttgctattgtgcataatgccgcaataaacatacgtgtgcatgtgtctttatagcagcatgatttatagtcctttgggtatatacccagtaatgggatggctgggtcaaatggtatttctagttctagatccctgaggaatcgccacactgacttccacaatggttgaactagtttacagtcccaccaacagtgtaaaagtgttcctatttctccacatcctctccagcacctgttgtttcctgactttttaatgattgccattctaactggtgtgagatggtatctcattgtggttttgatttgcatttctctgatggccagtgatgatgagcattttttcatgtgttttttggctgcataaatgtcttcttttgagaagtgtctgttcatgtccttcgcccactttttgatggggttgtttgtttttttcctgtaaatttgtttgagttcattgtagattctggatattagccctttgtcagatgagtaggttgtgaaaattttctcccattttgtaggttgtctgttcactctgatggtagtttcttttgctgtgcagaagctctttagtttaattagatcccatttgtcaattttgtcttttgttgccattgcttttggtgttttggacatgaagtccttgcccatgcctatgtcctgaatggtaatgcctaggttttcttctagggtttttatggttttaggtctaacgtttaagtctttaatccatcttgaattgatttttgtataaggtgtaaggaagggatccagtttcagctttctacatatggctagccagttttcccagcaccatttattaaatagggaatcctttccccattgcttgtttttgtcaggtttgtcaaagatcagatagttgtagatatgcggcattatttctgagggctctgttctgttccattgatctatatctctgttttggtaccagtaccatgctgttttggttattgtagccttgtagtatagtttgaagtcaggtagtgtgatgcctccagctttgttcttttggcttaggattgccttggtgatgcaggctcttttttggttccatatgaactttaaagtagttttttccaattctgtgaagaaagtcattggtagcttgatgggaatggcattgaatctgtaaattaccttgggcagtatggccattttcatgatattgattcttcctacccgtgagcatggaatgttctttcatttgtttgtatcctcttttatttccttgagcagtggtttgtagttctccttgaagaggtccttcacatcccttgtaagttggattcctaggtattttattctctttgaagcaattgtgaatgggagttcactcatgatttggctctctgtctgttgttggtgtataagaatgcttgtgatttttgtacattgattttgtatcctgagactttgctgaagttgcttatcagcttaaggagattttgggctgagacagtggggttttctagatacacattcatgtcatctgcaaacagggacaatttgacttcctcttttcctgcttgaataccctttatttccttctcctgcctaattgccctggccagaacttccaacactatgttgaataggagtggtgagagagggcatccctgtcttgtgccagttttcaaagggaatgcttccagtttttgcccattcagtatgatattggctgtgggtttgtcatagatagctcttattattttgaaatacgtcccatcaatacctaatttattgagaggttttagcatgaagggttgttgaattttgtcaaaggctttttctgcatctattgagataatcatgtggtttttgtctttggctctgtttatatgctggattacatttattgatttgcgtatattgaaccagccttgcatcccagggatgaagcccacttgatcatggtggataagctttttgatgtgctgctggattcgttttgccagtattttatggaggatttttgcatcaatgttcatcaaggatattggtctaaaattctcttttttggttgtgtctctgcctggctttggtatcagaatgatgctggcctcataaaatgagttagggaggattccctctttttctattgattggaatagtttcagaaggaatggtaccagttcctccttgtacctctgttagaatttggctgttaatccatctggtcctggactcttttaggttggtaagctattgattattgccacaatttcagctcctgttattggtctattcagagattcaacttcttcctggtttagtcttgggagagtgtatgtgtcaaggaatttatccacttcttctagattttctagtttatttccatagaggtgtttgtagtattctctgatggtagtttgtatttctgtgggatcggtggtgatatcccctttatcattttttattgcatctatttgattcttctgtctttttttctttattagtcttgctagcggtctatcaattttattgatcctttcaaaaaaccagctcctggattcattgattttttgaagggttttttgtgtctctatttccttcagttctgctctgattttagttatttcttgccttctgctagcttttgaatgtgtttgctcttgcttttctagttcttttaattgtgatgttagggtgtcaattttggatctttcctgctttctcttgtgggcctttagtgctataagtttccctctacacactgctttgaatgcgtcccagagattctggtatgttgtgtctttgttctcgttggtttcaaagaacatctttatttctgccttcatttcgttatgtatccagtagtcattcaggagcaggttgttcagtttccatgtagttgagtggttttgagtgagattcttaatcctgagttctagtttgattgcactgtggtctgagagatagtttgttataatctctgttcttttacatttgatgaggagagctttacttccaagtacgtggtcaattttggaataggtgtggtgctgaaaaaaatgtatattctgttgatttggggtggagagttctgtagatgtctattaggtctgcttggtgcagagctgagttcaattcctgggtatccttgttgactttctgtctcgttgatctgtctaatgttgacagtggggtgttaaagtctcccattattaatgtgtgggagtctaagtctctttgtaggtcactcaggacttgctttatgaatctgggtgctcctgtattgggtgcatatatatttaggatagttagctcttcttgttgaattgatccctttaccattatgtaatggccttctttgtctcttttgatctttgttggtttaaagtctattttatcagagactaggattgcaacccctgcctttttttgttttccatttgcttggtagatcttcctccatccttttattttgagcctacgtgtgtctctgcacatgagatggatttcctgaatacagcacactgatgggtcttgactctttatccaatttgccagtctgtgtcttttaattggagcatttagtccatttacatttaaagttaatattgttatgtgtgaatttgatcctgtcattatgatgttagctggtgattttgctcgttagttgatgcagtttcttcctagtctgaatggtctttacattttggcatgattttgcagcagctggtaccggttgttcctttccatgtttagtgcttccttcaggagctcttttagggcagacctggtggtgacaaaatctctcagcatttgcttgtctgtaaagtattttatttctccttcacttatgaagcttagtttggctggatatgaaattctgggttgaaaattcttttctttaagaatgttgaatattggcccccactctcttctggcttgtagggtttctgccgagagatccgctgttagtctgatgggcttccctttgagggtaacccgacctttctctctggctgcccttaacattttttccttcatttcaactttggtgaatctgataattatgtgtcttggagttgctcttctcgaggagtatctttatggtgttctctgtatttcctgaatctgaacgttgacctgccttgctagattggggaagttctcccggataatatcctgcagagtgttttccaacttggttccattctcctcatcactttcaggtccaccaatcagacgtagatttggtcttttcacatagtcccatatttcttggaggctttgctcatttctttttattcttttttctctaaacttcccttcacgcttcatttcattcatttcatcttccattgctcataccctttcttccagttgatcgcatcggctcctgaggcttctgcattcttcacgtagttcttgagccttggttttcagctccatcagctcctttaagcacttctctgtattggttattctagttatacattcttctaaatttttttcaaagttttccacttctttgcctttggtttgaatgtcctcccgtagctcagagtaatttgatcgtctgaagccttcttctctcagctcgtcaaagtcattctccatccagctttgttccgttgctggtgaggaactgcattcctttggaggaggagaggtgctctgctttttagagtttccagtttttctgttctgttttttccccatctttgtggttttatctacttttggtctttgatgatggtgatgtacagatgggtttttggtgtggatgtcctttctgtttgttagttttccttctaacagacaggaccctcagctgcaagtctgttggaataccctgccgtgtgaggtgtcagtatgcccctgctggggggtgcctcccagttaggctgctcggggttcaggggtcagggacccacttgaggaggcagtctacccgttctcagatctccagctgcttgctgggagaaccactgctctcttcaaagctgtcagacagggacattgaagtctgcagaggttactgctgtctttttgtttgtctgtgccctgcccccagaggtggagcctacagaggcaggcaggcctccttgagctgtggtgggctccacccagttggagcttcccggctgctttgtttacctaagcaagcctgggcaatggcgggcgcccctccccagcctccctgctgccttgcagtttgatcccagactgctgtgctagcaatcagggagactccgtgggcgtaggaccctccgagccaggtgcgggatataatctcatggtgcgccgttttttaagccagtccgaaaagcgcaatattcaggtgggagtgacccgattttccaggtgcgtccgtcacccctttctttgactcggaaagggaactccctgaccccttgtgcttcccaagtgaggcaatgcctcaccctgcttcggctcgcgcacggtgcgcgcacccactgacctgcgccgactgtctggcactccctagtgatatgaacccggtacctcagatggaaatgcagaaatcacccgtcttctgcgttgctcatgctgggagctgtagaccggagctgttcctatttggccatcttggctcctcccccaatacatataaattaggtttgtaataaactgagacagaaagaggatagattttgagatgaatgcaggcaggaatgctcccaggaatgaacctgggagcttcaaggaggtgagcctcaaggtgaccggtaggattgtggtgcccactggttccccactgaggtgctctccaagtgcacctctgtgctcatctcaagggataagtgtttctctttcctgtcagagccattttctccagatgtggttattggctgcaaagggcccaccatcactactcatggggcccccaagagactcatctcccctggcgctcacgaaattcagttgatgagtttggatataagtatacagccatgaaaccatcactacaatccatatcataaacatatacatcacctctaaaagttccttcccactctatttatttatgatgatgaaaacacttaagatctaccctctcggcacattttaaaatatacaaaacagtattgttaactataggcattattttgtacagtagatctttaggacttattcatcttgtataacggaaactttgtaccttttgaccaatatcttcctgtttttcgatggcctgttaatgtgctaggtaaacttcagaggatattttactttacctagctagttagctatctaactctgtaacatatcagcaagctaatgatataggtaaaatattattcttgttttacagctgaagacactgaagtgtaaagaacagattaagtaacttgtctaggataacacaactagtaagtcaaagaacagaagatgaaactcacatagtctgaatcccaaatccaagactggtattattttgggttggtgacatcactgtgaaaagtcttacagttcttgtccttcctcttatcggcttgttcagtgtaaatacatgaaatactgatggtctcagtttaggctggagacctaagagataccaagtcacaaaggaggctcattctttcatccagtgactattttttgggcacctaaacatgtcagaccccttcagcatggaagggaatccttggagtatgatacaaacaggcatttaccctctgagtgcccccttgtggccatacagcataacagctaagagtacctaggttcaaatgctggtgttgtcacttgtgtgatttgtgactatagataagttatttaactcacagtggctccattttgatatgcaaaatatgaatctgtttcataatgttttcaaatttaaacgagtttatagaattagtcaacacataaagctctcaataagtatacatgaatgttattactggggggaaatagttataatccactgagatgtcatgattactgtctgtggtatccaagaaaaggattctctaacacagcctatagagctaaagatttctctactgcgcatggacttggattaattaaggtagaaaagtgagtaaatcactttatgaggattttatgtgaggcatgaagagagggtttggactggaattcagtttcatctaaaaagaatcaagcctccagtgtggtccatgctacaagatggtactgtgaggctgctatggatctagatacaatggcaaagaaacataggttgaataggtgtatgctagtcacatgtaccctaccatgtgtgtcatccaattttgcaaaagcttgtggaaggaatgctgatgctgttatgctgatggttttggttatggcaaaaatattagttgtatgcctaatatttgctaaacatcatgctgggtgccttgaatatattaaagaataggagagatggtcatgtttcatggaatttacataataacatagaagaaaggcaataaatgcatacttttccatttatgttagatcatttaatcataactctgcaagatgttagacaagatcactagagaatgttatgtaagtattagtagatcctcattcaggctaaggggttagggggatccataaggcagtaatatttaaataatatttaatatccaccaagagttggtggataaataactagcccagtgaagggaaagtgcatggggaaaagcttccaggacatgtgaaacagcatttgttaaggccttgaggttggagtgatccttgcatcttcgaggaactgaaaggaggtcattttggttggaacagaacaagagaacaatgattgaatatattcaatgtaaagttgaaaatgaagatcatattacacagtgttttacaggcaatatgagtgttcggattttatcatcatgaaaatagcatgatgaaagttgacttaatattgatgtaatatggagaatgaattagaagagggctgaataatgtggggaagtccattaagatgttattgaaatgttgatatttgggtctagagagtgactgtaggactggtaagacgtcagtaaagcagaaaaatattcaggatttggatccaaaaggatataatatttttgcaagtagagttcataagtcaaacacctatttattgagcttactcctccttttatctggccatttctagtttatctttctggtctcaattaaactaattttccagattattttagttcttctccattaaagtggttcctattcctaccaccccaaacttactctctaaagcaaattaatgcatgtaattatttgtttagcctgttgtcctgatcactgtgagatttgagaaaatgcttatcctgttcactgtcatacctgagcacctccttcagcgtggttttttctctcaaagatgagtttacactaaccaacacattgaaatgtatgtgtgatgttattaatttccaatgagaaatagaattattgcattggcacaaattatcttgtcaacttgaatagtaaacactacctggggagaaacatatcatgattatatttctgggtaaacaacaaacaagaggaaaaggcttaactacaaaattcaaaaatttcgtgtcttaagtttggatagataaatatcaatctccaaaaacaatttattaattggttaaattattaatttgttaaaaaacagttcattaaatcatggtacttagcaggctagtagggtcttctctatagacctgcttgattattgttgtccttcaagtctcttgtgttgttcgcctttatctcctcctgtaagtggtgattttatgtgtgtgtgttggggggagtacatctgtttataatcatgaattttaatcctggattgaaatgaaatcttttctcaaccaataattttatgatatggcaagttgtgtaatctctttgaatttcagatatttcatctacaaaaggtgaataaaaatactcataggtgctttgaatattaaataatgcatatgaagattgttgtaagtttatggtatgtgcttggtcatcaataaatagtaattattttccatggcttatatttgtaattaggttaaatcagtcaaatctcaaatgtttgggaatcattgtttcctataagggtgtctttttatgtccctcttctgatgtcttgtgatggaattactgatgaattctaagaaggcagacttatttttctcatttcctagtaactacaggtactttcccgtgcacactctctccccattctcatgcacacatttacacacacacacacacacacacacactcattttgtaatttaaaacaattaaattttttgtcctataatttaaaacagttgtaaaatttccaatgaagttctagtttttcatgaggaagtctttgatgtgttttaaggcatcaaatattacacacatatatttataaagaatttgaatactcttctgatgctctaaatgtgtatgcttatttttccattaaataattccatattgctttcaagtatgataaaatgtattcataaggttttcactgataactaaatgagctaactgtgtcaaaaaacctagcagaatcacagatacttagtaaataaatattgttctcacattaactcttcagccaagataaatgcagataatttgggtctgcatcaggataattataattatctaacactgtttgaactctgtacaatttctaactctttaaataatttgtctgtgcatatcagcaagcttcttaccccttaaagccttcatttcttcattatgaaaggttgaatgtgatacaagatggccccgacatccttttacaaaatttaagacccttacattagtttcttaaaagtcaaacacccctcagactcctccaaaactccagagtcaacaggcatttgcaccccttattcaagattttttttctggcatataaaaaattggcaagtctttatgatagttcttgtttaataagtgtttacaatgtgatactgtttcaaatatgccaagatgtgtaggaatttgtgtatcattttacaaataaggaatttgaaacatgaacatatcaactaattttcttaatgacattcatttagacagggaaggagcttgttttgaatccaggtctggcagtagggtggcaagttgttatcagcttgccaaaactgaggagtttctcctaatgcgggactttcagtgttaaaaccagtacaggatggggcaaacaaggatggtcaccttatttgatgactctaaataattaggctcctctccgttgtgccctttgacttcttgaaatgcatttaagttgtggtatgcttactggaaagaaccctaatctgagaatcagtgagaatcagtggtctaggattcagttcagctctgttattggcttactgaatggattcttcctgggcgtcagctctcctacaaaatgaggagctgaaaatgttgatcacttcaggacaagccagtcttcattctcaattcctttgaaacttctaagtgggagaaatggcagagcacagaggagtccttcactcaagattttttagaatccctgctgcccagctacctcttggagcccttggacttagcagaaccaggggactctgaagacgcagctttatagagctcagagcagggagtgggtggaggctggcagtggggctgtgtgcagtgtgtgcagtacttggtatttctcccttcagtggacacttcaccagcctctctcctcccacccaccagagctaccctgaggaggtaagtggggacctcatctcttcccccacagaggccctcaggcacctccttcatagcttcgaaatcctttagtgattagggtacagggatttgaaggagagacagtctgtgatttaaggtaatttttattttcctacactccatttctctccccacatgcacatcccccatctagttggtgcctgaactgccactatgctggcttcgtgcttggagcttcactgtgtggttctgagcgtgtacagctctggctcagaggtgcatcttctgaagcctttgtttggtgtgaatgcctcagtgcgattaactcatatgccaatattctcatagatggtggataaaatggtgaaacaaaagaagggaacctttgattgggaaactgaatgtgggaagacagtttggagatgggatccggaactttcagcccctcaatgtccctctttatcacaactttcctagttgccatttattcagtacatcttgtgccgggagtctgaataagcaccttcaatgtttactttgcattactctttctattctagagatgtgaaaataagacgtgaggaagctaagtaaattcacagcttgtatgtagcaaaagtgaaataaaaactcagttattagatgctaggggagctatttttacttacctaaacaattttacagtaaaaacatgtagctcttatgttaatacattcttcctgttaataaaatgttttatttgatcaattttttttttttttttgagacagagtcttgctctgtcacccaggctggagtgcaatggtgcgatctcagctcactgcaacctccacttcccgagttcaagggattctactgcctcagactcccgagtaactgggattacagtcatgtgtgaccacgcctgggtagtttttatatttttagtagagacggggtttcaccatgttgtccaggctggtctcaaactcctgacctcgtgatccacctgcctcggcctcccaaagtgctgggattacaggtatgagccactgtacctggcctatttgatcaatattttaaccattaaaactagaactggtaatctctgagtcctagtctagggctctctatgccctgtcacttgcctaagcattgagaataaaatgagaagaaacacagacagttacagggagttataaatttttggggaaacaaagatactaatcaaataactaaacaagtacataataaatgcactaaaatttaagctgtgataagaaaagtcacaaagaagaatatgtgtgagtatgtacagcagccaaaattatgagaagaaatgaaatgaatgatcagaattattggaagacgacaagttcttatgtggtcttgcagcttctatgatccatggtaaggacttgaatttttatttcttatttcataaggtaagtgaagccattgataggtttctagtaaaagagtaacatcactttatattaaaaacaaataatttggttgctttgtgtcgaatgaattagacagaggcatgatactaagctgggtgatcctcaggaaggttctgcagatattttggttgaagatgttgagggatgagtgacagttggaagtgagatggagagaggaaaccagcgtttacgatggattaatagacttgtaaataggagagggtgagaaatattaagaatgacttccagggttttctggcatgaccacgtgaatagatggtgactggtgatgagatgataactttgaagaggataaaacatgataattgacataaagttcaattttgcacattatgtttaagatgacaatgaactcttacatttggaagtccagttggaaattggctgcgtgaatacatattgagaagagaagcctgggcagcagacatatatttgggataattgaggcacagagcagagacatggaggacattatgggtagacaataatttccaaggtattagttgtgaaagtgagtggaaaatgggtgattactcagaagaaatgagggggcaattaagaggtttgctgaagtttgtgattgtttgttttctacgatagtaactcccaaaattgatcctcggggggaagaagtgataatgggtgggacatatttgaatgctgataggagtgacctaaattcctgatactcacacttggctgcacacgggaattgcctatgagtttaaacacatgctgatttgtgagttctacttgcacagtgtcaaatttaattggtataggtttcttctgaggaaaggaatattttaatgcttcttaaaataatctagcatacagcacaatttgagaatctgtggtctaaacagagattaaaacaaaatccatgttaaaatatagaaaggcaaaaccaagagagtcaggtgtggaggaatgtgacattctggacccttggtgaataagtgaggggttcaagccacaaggaaaaggcagagaactgaaataatgcttgagtataggcaagagaggagagacagcttagaatatacacaaaagatgtcatcacttgcacaagacagaatcaatcagtgggtgggaatattaaggaaagacttcatggaggacatggtgcacctcacttatggaagaaactgatggctatgacccagtagagagaaaggggaaatcatttttcaccattagagaaagacgtcaaccaatgtaaaaaactatatagacacaagaaaaataaaggataatatctaaaaattagtcaaaggtttctatggggaagaacctggagctcatgacagatctaagggtgctgccaggctatagaaggtctgaaatgtaatctggttttttttgaactttccaaatctttggcactggaatctaagcatcattgtctctcctagttttagatatcaaccactcctagtcttcacttctcccaccatctcacctcaattcacccaggttgcgtttgcctaaaagtcactcagaaaccctgatggggggctttgggactaacatctcaagtactaccagcttcactctaacaggcttccctgagatgaagggtctggagcactggctggctgcccttctgctgctgctttgtgctatttccttcctgggcaacatcctcatcctctttatcataaaggaagagcagagcttgcaccagccaatgtactacttcctgtctcttttttctgttaatgacctgggtgtgtccttttctacattgcccactgtactggctgctgtgtgttttcatgccccagagacaacttttgatgcctgcctggcccagacgttcttcatccacttttcctcctggacagagtttggcatcctactggccatgagttttgaccactatgtggccatctgtaacccgctgcgctatgccacagtgctcactgatgtccgtgtggcccacaatggcatatccattgtcatccgcagcttctgcatggtattcccacttcccttcctcctgaagagactgcctttctgtaaggccagtgtggtactggcccattcctactgtctgcatgcagacctgattcggctgccctgtggagacactaccatcaacagcatgtatggcctgttcattgtcatctctgcctttggtgtagattcactgctcatcctcctctcctatgtgctcattctacattctgtgctggccattgcctccaggggtgagaggcttaagacactcaacacatgtgtgtcacatatctatgcagtgctgatcttctatgtgcctatggttagtgtgtccatggttcatcgatttgggaggcatgctcctgaatatgtgcacaagttcatgtctctttgtacctccaatgctctacccaattatctattccatcaagactaaggagattcgcaggagactacacaagatgttattgggagctaagttctgatcaaggaaaactgtcctggaaaggcttagagtttctttgttgttgctgatgtttgggtgtaccaggttagtccttcggagcctttcaatctccctccagacgtacacctataattgtgtacctgccagaagttatatgggttagccaggctacaacttgtaacgcaaaacatcaggctgccctatgttgtaattaactgtcacaggttgccacaagtgacttctctcagacccaacaagaaagagagtcttgaactgaatcctttttgtcccaatgtactaataacatctatgctttcaagtaattctcagaaacagacaaaaactaatgcatacattcgttatataatgttataatgtagattatgttacctgagatcatatcaacccagaatatttaatcattctgaatatctttaaactcaaaaactaaagatatgtaatagctgtgaccatgtttacacttctgaaataaataagaataatccagagttctgtaaaatggaacaaaaatagaaaccatacaacacatggaattcagaagtttagtacaaagaaaaatgttttatagaaaagtcacatgctgtcatcattgggcatgactacagagaggattgaatgactagaggcagctaatcaacactccaaatcgaagcctaacagaggttgttgattgatgggctggcaagtccacttcagtggcagtggttgcttggcagcatagttggctgaaatatgggctcgtgtcctgcagtgagcaacccagacaacaagcttaagcacatgcctgagcagaagagggatagctgaaggctgtcagcaaattcacagagaaagccacaaagaaagaaatcctctgaaaaaccatgccaagaagacacaacccaggccacacaggcaggtgcacacttaacagatttaaaaagaatgatatgtggactttaactggagagtaaacagttagtggacaggccatggcataactcaactccaatggatgattagggaatgaagacatgtaagaagaaaattactttttaaaaagcaatagctaataattttttttcctcataggatcatggaataacttttttaaaataaagccatagggatcaaataacatgatcatttactaaacatagttgcagtatagacttgaatttctcccaaacaccccctgaacgtctcattaagcaacgaggagagaaaagcaaaacaaaattaaaacttacagatgacatctttggcaaaatcacatgacagaaaaatcttgcccccaattggagaggactgtatactaagcaaaaatctgggcatatggttttgagattgactggtgaaactgggaacaatacttgcaggctctaagtgctcataaacataagaggataaagaagtgctgtggtggtcctcagcatttgaaaatctcaaaaatgtccagcaaatgagctcttccaaaaggatatagcctcagcccaaaggaaagtacattaagcaaataaagatccacttgcataagagagaaagaaggctctgatcgtagaggaaagggcttagagaaagcagacacaagaaagtgatgcaacagctaaatacagcttcccaaaacctgtggcgttctggggctggaacagaaggaagcagaatgtcctcctggaccagacttcgctctgacacacagaagtggcctcaaagaaagtgctactttgagccatttgaacagcaacagagggacccctagagctgcaaagctataaaagctactctgccattgcctctcccttcagaggatcccacaagtcatcccagaaagctatacttacttatatagagagacaaaaaagagatatgtgctaattctatacacagttatgagcaaaaataaaagacatcaatgacaaagatgaatccatggcgctcagggccatgctgatgatagcaatctccctcctttttgtttcaagtcttttttttattaatgctaacatttcagtgtctgcatctaaatatcagaaaccacattactgacttcaatattttttaggcttttaaaaaatgcgtcctttcatttccacagtaaaattgggaattctcataataaggcatatgaatgggaagagcgagtacttctgcaacactaaaaagtattcctatcatttatatcatcacatatatgtaaatatagatatagttttactattgtctaatgagtattgcctaattccctaattaacagacttatgaaaaaagcctcatctttatgaaataaaatatatttgttcaaactggtaatataaatattttacagtgtattgtcgtctacgtaaatgataaattatcaaccttcgcccactttttgatggggttgtttgtttttgtaaatttgtttgagttcattgtagattctggatattagccctttgtcagatgagtaggttgcaaaaattttctcccattttgtaggttgcctgttcactctgatgatagtttcttttgctgtgcagaagctctttagtttaatgagatcccatttctcaattttgtcttttgttgccattgcttttggtgttttggacatgaagtccttgcccatgcctgtgtcctgaatggtgatgcctaggttttcttctagggtttttatggttttaggtctaacgtttaagtctttaatccatcttgaattgatttttgtataaggtgtaaggaagggatccagtttcagctttctacatatggctagccagttttcccagcaccatttattaaatagggaatcctttctccattgcttgtttttctcaggtttgtcaaagatcagatagttgtagatatgcgtcgttatttctgagggctctgttctgttccattgatctatatctctgttttggtaccagtaccatgctgttttggttactgtagccttgtagtatagtttgaagtcaggtagtgtgatgcctccagctttgttcttttggcttaggattgccttggtgatgggggctcttttttggttccatatgaactttaaagtagttttttccaattctgtgaagaaagtcattggtagcttgacacttctcaaaagaagacatttatgcagccaaaaaacacatgaaaaaatgctcaccatcactggccatcagagaaatgcaaatcaaaaccacaatgagatatcatctcacaccagttagaatggcaatcattaaaaagtcaggaaacaacaggtgctggagaggatgtggagaaataggaacactttttttttttttttttttttttttgagacggagtctcgctctgtcgcccaggctggagtgcagtggcgggatctcggctcactgcaagctccgcctcccgggttcacgccattctcctgcctcagcctcccaagtagctgggactacaggcgcccgccactacgcccggacaattttctgtatttttagtagagacggggtttcaccgttttagccgggatggtctcgatctcctgacctcgcgatccgcccgcctcggcctcccaaagtgctgggattacaggcgtgagccaccgcgcccagccaataggaacacttttacactgttggtgggactgtaaactagttcaaccattgtggaagtcagtgtggtgattcctcagggatctagaactagaaataccatttgacccagccatcccattactgggtatatacccaaaggaatataaatcttgctgctgtaaagacacatgcacacgtatgtttattgtggcattattcacaatagcaaagacttggaaccaacccaaatgtccaacaatgatagactgaattaagaaaatgtggcacatatacaccatggaatactatgcagccataaaaaatgatgagttcatgtcctttgtagggacatggatgaaattggaaatcatcattctcagtaaactatcgcaagaacaaaaaaccaaacaccacatattctcactcataggtgggaactgaacaatgagatcacatggacacaggaaggggaatatcacactctggggactatggtggggtgggtgggggggagggatagcattgggagatatacctaacgctagatgacgagttagtgggtgcagcgcaccagcatggcacatgtatacatatgtaactaacctgcacaacgtgcacatgtaccctaaaacttaaagtataattaaaaaattatcaaccttaactttctaattctcagatttttgtgttaaaatcacccaatgcattttgtgttcacaatatatttgctttttcaaatatagaaaaacccacttggcaaatgattaagttctactctgtttaaaattcactgaataatttgtcccagtcagagacattaggtttagctattaagactaattaaaaactgactgccagtcatagttgcttattgtctgttttccatcataaaaaagcaatttccccagcttgtagttctggggtatttgccttaaatacatagcactgtggttggttctaagctgttgttctgtcctcatacagttgacatgaacattaacacgtccaccagtaacacactgccctcacagtgcagccattcaaatcatggtgaggctttgtgagaaggaatttaaaagcattttaaaaggaatatttggttagcaaacaaatctcaggatatgttgacatatccctcctgtatctctttagacaggtttctcccataaaacctaatgactaaatcccagggtcactgagtccttcaaatgtaacactgggattggcaaatagtaggtttcaataaatattgtcttgtgaacaaaataaatgaatgagctgttatattccttataaacaaacaaacaaaaacctaaacaaagctgggaggaaaaatacataaccaccagaattatatccactccccaaaatatcttcagtgttttaaaactgggattgagtaaaagatagtgacgaaatatctctgctaggaagaatgaaggttgagaaacactttagggagagtatcttgattaacatggctggcagtaaatgatatatcaaggtggtccgatagccagtactgctgtttgcatttctattagttgagatcagtatgtcatccatacctttaataaagcctatcacacaccaatgccttggataagttacacatgcctccagaaatctgtagaaagtttggctggcaattatactttacacttgaagagtactggaggcttgtgcaactatttatttgtgcaaatatttattgtcaactgacgcctgaattgtacatgtacaaatcaaatgaactaattaattgcctattcaatggataatttattctatttcatacatatttttggcggagaagtcttccatgcataatggaaacaaagaaaaatcctttatacatatgaatgaaaccacacccacctacccctaatacgacaaaacaatgagaccaaatcttgatttctgacataagtgtcgagttactatttgcttaatagtcctcctattccctgcagagggtaattttttggaacagattcttgattagttttttgatgttaggaagatgagaattcacaaagtaactgatgacttcatacactgtatgctgtttctaggaatcctgaaagcatttacgagcaaatgctctcctcagttgtctggagggcatctggttgcctgtgttcaaatgtacaagcacctacaagtagattacttcttatctgagaatgaaattaaacaacagagggtcctgagtccaaagtagtgcatcagcccaggtagaaaagtgtccagttgataatggaatattggatatcctcctgatgaggaagtgcccttgctgcacattactcaactcagaggataaactctgtgcctctgctgccatttgtcgttttttaaaacactatctgggtgaagagaacttctcatccaactgaactataaccacaagagcaaagaagttcttgccatagtagagcccatcaggtctgtaggtggcttaattgaggtaggtcaggacctctttgtggtaatcagaaaatgaggctgatggtcagccatcctagggacatacactcttctaccaagttctcctttcgcctttcccctcttccctgagttcacacagaaattaattccataaaactctgagcaacatggatttgtatttttttcattctgcattagattctagttctcttaacccttctgttggtcttgcccatgaaacagagagagcaagaatttcatcctactataattattctgagtgtctcctccctctctcctcaccaacctacccagcactggccctggaggacgagaaacatacccatgacagggcaagacaaaagcattactttattattcacatattttttccacacaccttaaacctatgttcagtatttgattttcttgtgttgttagaggaaggcctaacgagcctaaaaaatagaagtacaaattttctttgattggggagagagccatgatggttaactagccacagccaggaggagcttctcccatgaagagaccagatcatcaagagaccaacacacactgaacagatcttcggaaagaaggcatccagagtggatacaggaggatgctgaaacaggcagaagctggaaagcctgtatggggtagtcgagcaccaggactcctttctggccctgagtgctggtagggacgggatgagaaacataggcatgtagtgacccactcttgccacagaccttcaggatcctacctgcaggagaacccacaatccccatgggcattttaattggcagggagaactgcccagagagttgacagagacagaactccagtctgtgcaaggcccaaggggtttggcatgggaaaggctgcagtggagtatggccatggatgcccattaccccaaagcttgccacactcctgtaggtgactttagccttagttagcagggagacctggagagagcagagctctcttgcccacgggacagggcaagtctgatctgaatgagccccagtctgccagcctctcccagggtctccacctggccttaccagcttgcagtgcagtctcagctgtcctgccaaaatgcttgccagtggctgctgccatagctcttttgctagcaacccccgccctcggaacacttttgcagatagatccttgcaggtgtgcacctgcctgcagccttccccgccggcgcgcctcgcctccaccccctggcctgcagcctctcaacatgaataggaagacccaccatcgcccgagcagtgcacatgagcactggggaccccagtcatcccattggcatgcactcaccagggccctcacttgccaccccatcagtgggtgatccgcttgtgcaccctcacacgcagccccccagctgcagccagcacacacgtgcccccatgccaccatgccgtagggcaatctccccctcaactactgcctggccacagctcttttgctggcagcccctgtcagagtgttgttgccagtgagctgggagcaccttggcccctccagtgcaacaggtgcttgacctcgaaaggccagaaaacaaagccagaggcttggtcccagacccccagggttacagcatgtaggccaagagtgctgagctgaaccttggccctttgaaagcatctaccaacaaaggcaatcaactaaaccaaacttatatcacatttaaatcatcaaaggcatcaaagaatatgaaagcaaaagccctgttgaaaggatagcaacttcaaagattaagggaacatcagccaacgcagagaaagaaccagggaaagaattctggtaactctaaaggccagagtgtcgtcttacctaccagtgactgaaccagctcccccagcaatggttcttaacctgattgaaatggctaaaatgacagataaagaattcagaatctgatggcaaggaagctcaatgagatactgaagaaggttgaaacacagttcaaggaaagcagtaaaatgactcgagttgaaagatgacacagccattttaagaacaaaccaaactgaacttctagaaataaaaaattcagtagaagaatttcttttttcaaaacttttacgttcaagggtacatgtgcaggtttgttatataggtaaacttgagtcatgggaatttattctacaaattattttgtcaccaaggtactatgcctagtacccaatagttaattctttttgatcctctccctcttcacatccttcaccctccagtaggccccagtatctgttgttcccttctctgtgtccatgtgttttcatcatttagctcccacttataggtgagaacatgtggttttctgtttctgcattagtttgctaagaataatggcctttagctccattcatgtttctgaaaaggacatgatctcatgatcttattttttatggctttattttttattgctgtgtagaattccatggtgtatatgtttgatattttcattatccagtataccattgatgggcatttgggttgattccatgtctttgctattgggaatagtgctgcagtgaacatacacatgtgtttttatggtagaacaatttatatacctttgggtatatacccagtagtaggattaatgggttgaatggttgtcctgtttttagctctttgaggaatcaccacactgctttccacaatggttgaactaatttacactcccaccaacagtgcataagcattcccttttctccacaacctcgccagcatctgttcttttttgactttttaatactagccatttagactgatgggagatggcatcccattgtggttttgacttgcatttccctaaagatcagtgatactgggcttttatttcacatgcttcttggccacctgtatatcttcttttgagaagtgtctgttcatgtcttttgcccactttttaatggtttttattttcttgtagatttgtttagcacagaagaaaatatctgcaaagcatacatctgacaaaagtcattctatgaggccagtgtcatcctgataacaaaacctggcagagatacaatatattcctgatgaaactagcaggccaatattcctgataaaaatagatgaaaaaaatcctcaacaaaatgctagcaaacttaatccagcagcacatcaaagagctaatcccctataagcaagttcgctttatgttcctgggatgcaaggctggttcaacctacacagatcaataaatgtgattcatctctttaacagaactaaaagcaaagaccatgtaaccatctcaatagagacagaaaaggcttttgacataattcagcatccttttatactaaaaacactcaataaactaggtattgaaggattatacctcaaaataataagaactgtctatgagaaactaacagccaacatcatactaaatgggcaaaagctagaagcattccttttgagaactgaaacaaagcaaggctgtccacttttaccactcttactctgcatagtattggaagtcctagccagagcgtcaagcaagagaaagaaataaaaggcatccaaatgggcagagaggaagttaaactatccctattttcaaatgacatgtttctatacctagaaaatcccatagtctttgcctataggctcctagatctgataaacaatttcagcgaaaatttaagacaaattgatatacaaaaatcagtagcatttctacatatcaataacatccaagttgagagccacatcaagaagtcagtcccaatcaaaatagttacaaaaagaataaaatacctaggattacagttaacggtgcaggtgaatgatctctacaatgagaattacaaagcactgttgaaagaaatcagagaggacacaaacaaatgggaaaacatttcatgcccgtggataggaagaatcaattttgttaaaataaccacactgcccaaagcaattcagagattcaacattattcctatcaaactaccaacatcttctcagaattagggaaactattctaaaattcatataaaacaaacaaaaaagaatgcaaagagccaaagcgttcctaaacaaaaataacaaaaccagaggcatcacatcacctgatttcaaactatactataaggctactgtaagcaaagcagcattttactggtacaaatagacaaatggaacaggttagagaaaccagaaacaaagccacacacctacaaccatctgatctttgacaaagtcaacaataacaaggagtgggcaaaagactccttattcaatacacagtgctgggctaactggctaaccatacccagtagattgaaactggacctcttcctttcatcatacacaaaaatcaattcaaaataaattaaaaacttaagcataatattataactaaaactataaaaatcctagaataaaacctaggaaataccattctggacaaaggccttgggaaatatttcatgatgaaatctccaaaagccgttgcaacaaaacaaaaatatacaagtaggaactcattaaactaaagacctttggcacagcaaaagaagctatcaatagactgaatagacaacatacagaatgggagtgaatacttccaaactatggacctgacaaatgtctaatatccagaatctataaacagtttaaatcaacatgtaaaacacataactccattaaaaatgggcaaaggacataaagatatccttctcaaaagaagacatatacgtggccaacaagcatataaaggaatgctcagcattattaatcattagagaaatgcaaatgaaaacctcaatgagatatcatctcataccagtgagaaatgactattactaaaaagtaaaaaaattacagatgctggtgaggttgcagagaaaatggaacacttatactctgttggtgggaatgtaaattagttcagccactgtggaaagaagtttggatatttctcacataacttagagctacccattgaccccaaaatcctattactatatacccaaaggagtataaatcattctaccaaaaagacacatacgcttgtatgttcattgcagcagtattcacaatagcaaagacatgaaatcaaggtgcccttcagcagtggactggttaaagaaaatgtggtacatatataccatggaatactatgtagccataaaaagaacaaaatcatgtcctttgcagctacatggatgcggcttgaggccattatcctaggtgaattaatgcatgaacagaaaaccaaaaccacctcttttcacatataagggggagtaaaactttgaatacacatggacacaaagataggaacagcagacactcaggcctacttgaaggggcattgtgggaagagtatggggttcaaaaaactacctttggggtactatgctgtattaattcattttcacattgctgtaaagaaataatggttctgcaggcttacgggaagcatgatgctggcataggctcggcttctgggaaggcctcaggaaacttaaaatcactgtggaaggtgaagatggagcaggcacatctgatgtccagaggaggactaatagagaagtaggcagtgccatacatttttaaacaaccagacttcatgagaactcactcactatcatgagaacaacatcaagaagatggttctaaactatgcatgagaaatctgtccccatgatccagtcacctcccaccaagccccaccttcagcaatggggattatatttcaacctgagatttgggcaggaaatgtcatatgctcactacctgggtgatgaaataatttgtccaccaaaccccggtgacatgcaatttactcatgtaacaaacctgcacatgtactgcctgaaattaaaagttgagcaaagaaaaagtaaccaaagaattcaaaaacaaagtttgatttttacctttattttagaccaaaattcaagtatttttgctgtttcaatagcggaaaatgttgagttcaaaaaagattatgttaaataaaaagaagttaaagagtttttaacccaaggtcaaaaaaacaaaaacagggcttagcttagacctttttaggattagagctgcaggagtggccctacatttttcttatggcatctgtctcatgagggagggaaaaatataaatgtgcattttccattagaacctgaaaatcagtagctcttttaattaatgctgaaaaaaggaaggtgaaattaaggtacaaaggagccagaggctttttgggaggctcatattttcttgttccttgccctttctatgttacaccattgggtttctaagtaaggcctatggtcaaaagaatgtatccctcgctgcttctgaggtaggaatcagtgagagtttactttcatttggcggcttccctaagccttgcctttgcatttatgtatttgttgtatatatttgaaactaaaatatcaaagcattaaaattattatttcatgttgaaataggagcttctaatatgaatcagaaaagttattatttaaattgactgaagaccatactttaaaccactaaatattctaataattttccattggaaatcatactaagttatgctatccaaacattcttctaaaagcaatctatttagtgggccaggacacatatattattggtgtcttattgtacctgtagacatttttgaaaaaaatctgaatcccaagtacttacattatctcatttttaaaatagctccctctttctgactctctctcttgttggtatttcctcaatacaaagagaaaaaacctctagataacaatatgctttgctactacgtggtttctggatgagtttccatggtgagttaagttagactacctagtgcatctctctctctctctttctctctttctctttctctttttctctttctctctttctctttctctctctctctccccccttctttctcccccaatccctcgctctcttttgatctacaagtagatctaaacttagtatgacagcaccaaaattagcaccaaggaatttcttactatatcctacctctggtatcaagggaagcgtatgagaaggtctgaaagaattattttctggtatctaaaccataagtgctctagtctgtctatcctaggctttttttttttgcaactggaaatcctagactgacttaatttctaacatctcttaacatgtcattttgtggaagacagttaaaatctcaagaaggaaagagaaatagaaattgtgcccctaccacaattccccctttcccccaaaattctatgagtcagatatttcagatattgaacattgttttctgttggtaaggattgagtggtgggcagataaaagaagtaaagaagaatctggagattttcctaaatggcaatatctatcagtttacctggatcacatttgttcatacattttatggtgagttctaatagttaagctgatttcactttgtgaagttaaagcaatgtatgagtgtttgagaatgacagtggtggggaaagcaaaggcagcaatggtaatgttaaatgatgccaatttgaccgtcaggccatatttataccggttgggtgctgcactgacactagagagagattagtgttgaatgtcaactggaccacatattatctgtgttaggctgaagaattaacttaattctctgtgtcttagaggatttgtatgaatattaagtgaattaatacacacaaataatttataatagtacttgatacattttaggactaagtttgttaattattatattagtaatattcattattatagaaaataattcctagcttaaattagtcttcctctgtaaaacttgtctaattactcaattgcccccaatatttatctttctaagaatactgttggtatttagtgaatgtactattcatttggaactccttgttttgtgttataagttttgcatcaccatctcctggcctacttttcccgcagcacacaatctatcttatactttgatgatgatgatgacgatgctactgatgagagcctatggccaaaataacagattctaaagccaagtgtgaaagtcatattttgatgtggtgaaacatgcggaaaatggctcggcggatttcctttgtcttggcgctataaatgagagggttgagcacaggaggcacaaataggtacacatttgacatgaggacatgtatgtagcatgggacatgcttcccaaagcggtgcactgtggagaccccaatcattggcacataaaatgcaagtacagccaggatatgtgacacacatgtgttgagagctttgaggcgttcctcacgggaagcagtggccatgacagaacgcagaatgagcacataggagaggaagataaaaaacaggtccatgccaaaggtggatacaagaacaaagagtccatagatgctgttgatactgatatcagcacaggcaagcctcatcatgtctgggtgcaggcagtaggagtgagaaagaacattggatctgcagataggcagcctcttaataagaaagggaagagggaaaagggtgatgaagcttcgagcagctgcacctaaacccattgcagcaatgacttcagtggtgagcacagttgcatagcgcaaggggtcacaaatggccacatagcggtcaaaactcatggccagcagaatacctgattccatcatggagaagaagtgaataagaaacatctgaattagacaggcatcaaaagtgatgttgcgggcattgaggcagaaggttcggagtacagtgggcagtgtggccatggatatggccacatcactgaaggacaacatggacaggaagtagtacatgggctcatggaggctgggctccactcgcacagcctgcaggatcactgtatttcccccaagggccacagcatacatcacgcagaggggccctgacagccaggagtgagagctctccagaccagggataccagtcaggaggaagaatgcagggtgagtgacattgaacaaccccatagcaaaacaaacttagggtacttttcagagtcagatcttctgacttggagaattctaacagttgcacttgctggaggacaagaaatcaggagataagagacaaagcgatgatgttgacataaatggaaactgacgcattcatgaaatcactgcttttgagatgatgcaggcaaactccttttcttcatattttatgatgatcagcctgcaggctgagctaatatttccctctattttatgaacaaggaagacattgacaaatacttcaataatagaaattagttaaaaggaaaatgtttaaactacatttctacaacttgcatatattttggaggcatgattcaatagaaatatgctaactacaattcatagccacaagagaagaaagtcaggagtttgtgttatcagtagcacttggaaatatttaaatattttcttgaaaatgttgcttaattcatatgtatcacaaattaatgagagactttcccagagcaagttttgtatcatgttgtgtgcttggatggagagggaaaaggacagtgggctgtggaggtaattgactgcctccagaggcagtcatgagcttttcattggcagaattactgcaaaaaagcaacaacagaaataacatatttttgtgcaaaggcacaaggctgtatctgtttctggaaaaattatgtatttgtccctaaatattctataggtacactagcattcggtgtgggagagcattgttccaaatacaaacttacataccatcacatggttagatgtactctcaaaatacccattagtcacaaggacacattaatgtaccttcacaacaggtagtaagaaagctcattcatagtctaagaagacgctcattcacatactctctccatatctccatatctcgtaaagtcgctcttgttgtgcaaatatattcaaacagtccctgttgattttttttttttttttttttttttttttttttttttttttgagacagagtctctctcttttgcccaggctggagtgcagtggtgcaatctcggctcactgcaactccacctcccgggttcacgccattcttctgcctcagcctcccgagtagttgggactacaggctcccgccaccatgcccggctaattttttttgtagttttagtagagacggggtttcaccgtgttagccaggatgatctcgatctcctgacctcgtgatccgcctgccttggcctcccaaagtgctgggattacaggcgtgagccaccgtgcccggcccctcttgatctttataccatttaacatgtagatcttgtcctcatactctcagtctgcactgacatatatgcaggatttatacatgtatacacactcatagacacatagatttgtatactcacacaacacttctatctacatgcttggggactgcccactgatattaatctactaacccacacaggcactttttaaacccttaatggcttgtatttatttaccatttttcttatgctggcattcacatattatttcttacagccatttctctgtcacagtgattgtattgtttattctgtttttgacacacttttgtgttcattgcctcatcgtggatgaggatacagaaggctagaaggcttttcactaagcagacatttcaagctaataggtcaccctcattttagagaaggaccccagaattacataccgctgtttttcctttctctttcctctccaacctctaacaaagcaagaccggaccatgctctcagagttctttctgatgggaatgaaggagaaaggggacccaggaacatatgaggtatctaaaagtaacagaggttgtggaatggggtgcaatgaagcattgtcaccccaggaagcatttttaaaatatccccagcaatacataactcacaggtactatggtttccagcaaggcagtggctgtccctccgtgttgtactgaatatgtcccttctggtcttagagctcagtctgcatatgcttgtgtctcttcaagaactctgattacttgggatccagaactgatgtttgtctcttatttctcccatttgactacactctcattcttcatataaagtcttgtagaaagtaatcacagtacatagaagagaaccaagccaatgtaaaagtaacagaaagagaagggagaagaaaacaggctgaaagcaggattttgttcagggcaaggccaaagccattctgggtctggggacttatgctttagtatttgtagaagaaagactgcctgactgttccagaattatatcccttcccttaccttggggattgctaattttgtgggttgtctggacagataggaataaagtaatactgagaaagaaaatgaatacttattgaacgcatgtgatatgtcagctgctctgcaaggaactttacatttattttctcgtttaatacttaacagatatggacactgagagccagtgagatgagctttcctcacagtttatggagaccaggtgataaaacattaatttaaagacttttaagactctcttctctctttttcttttttttttactttaagttctgggatacatgtgcagagcatgcaggtcatgtcctttgcagggacatggatgaggctggaagccatcatcctcagcaaattaacacaggaacagaaaaccaaacaccgcatgctctcactcataagcgggagttgaacagtgactctcttctctcttaccaaggtcttcgaagtatcattaaggcattggagagtaagtttaaaaggaaaatagaggaatgcatttctgaacaaagatttcacaggtacccctaaacaaagtgagtggttaaaggcagatacataagaaaaaattacacaaaagtacctgtctccaaggctgaacacaaattctcctattcctggaactagaaccttgagatttctgaaaccatataggaaccaggtggtttagaagaaaggaccccgagggtgtcaggagtcctgaccctggctctggaaggtactggctatataagcgtagaaatatctatttctttttttagacctatgtcttatttttattcattaattaattaattcatttatttatttgagactgagtcttgctccatcatccagggtggagtgcagtggtgcaatcttggctcactgcaacctctgtctcccaggttcaggtgattcttgtgccccagcctccccagtagctggaattacaggcgcctgccaccacgcctggctaatttttgtatttttaatagagacagggtttcaccatattggccaggctggtctcgaacacctgacctcaggtgatctgaccacctcagcctcccaaagtgctgggattacaggtatgagccaccacgcctggtgtatgtcttatttttaaggacattctctgagatcctttatggctttgatgttcttttacttaattttactttttaatcaagcaaagaatgcctgtgagagtttgctatggtgctgttatgggggcagaaagaaggtagaggctggaggaatgtacagaaaggctgtctaaagaccacagttttcaatctgtatcatggataataaagaatgaaaattatcagctattcattgttcatctacagtttagctgatttctccttttaatatcctggagatttttacgtattttgttatcactgaattcataagggaagagcaaaattaaaccacatgtgcttcagctgtttgtcatgggataggttgtgaccacttcccttctagattcccgaaccgttcctgtatcctgagtcctgcttccctctctgaatttgcagcaatgttaatgagccacagaaactttgacctttgaaacttggagtcacagagaaattgattatggcaagtaaggactcaatgaatcgcttggggttatacaatcagtacatggcagtgccagaacaagaaccccaagtccagagatctttcctgctcctttgctcattctactaagatgcttctatcagataccctccaccagtctcttccacttcccctcaccataccccttgcccagtctaatgctttcatggagcaggcttcaggagaatcagctggcttattcctatagagtttcagaactcaccagaagagagactgatgagacacccacagaacaagttcttccctgtctctgctgaagtgaattcatccttgccacttttatgtctcatgacaggccctgcggtagagggcagtgatgctgactttgtgtctgaaaattcttcagggaggttttagtctcctgaggtccataataactactgagaataaagcctgtgctcttttagctgaaaaagaacttagcaatctgtcagaccaattctctgctccactcaaaacatcttctagtgatagacaggcaatcgctgtaagagaggagctcattacctcctaagagattctggctttatgtgatgatgaccaagcccatcaattgaggtgcaatcagaaagtgactatttttactcttcttgtctctttaaatatattgagtggggctggttcttctttgttattcctggatgaaaactctgttctttaaattttctggtcacattcagataataaaatatcttctggtgaataactagaaggtttaatctagaataatagtcaaactttccagcattcagagctacatcctttcttcttctttcatccttcatgtgctaactctggtttttggcttctcctcccagaaacagacagatgggggaatggaaagttcacaattaattggtgctgcagttagttgttgtcatgttaactgggtctcttaaatgtataaagctgactctttcttacagttactttcataggttattcttagaagcttcttctcattttttacttgttctccacttggtttaagctaatatatcattattctgtgtggttgcttataactccttccacaacctagattgctcttgtggaatcttgcagtcttttggataggacataagacaacaccgtgccatctctctctagcttgtaccccattcaagaaatggtcaggcttttacaacaaatgccctacctcaatgcaacaatagtctctccttaaatgttgctatcagagcagaaaggtacgtttatcagtgttaatttattcatttagattaacatctactgggtgtggatcatattaagtgactctgttggcttcacatggatcagtcacaatctaacctaggaacaaaaattagggttcagttatggtctggtcagaatataagaaacacaccagctcttttaattgagaaaaattaatgaattgttaaccaaatattggcgaacacacaagacaaaaagggaatatgaaggtatcattgtaggcagcaacttgaggacatagcttctaagcctaggactagaggaacaaaggtaggaatttggcataattaaaccttacaaatttgaaacaggagtgctgcaaagctgaaactcagactttgaggagtggtcactgtttaggtgattctggggtctcaagaattcagaagagaggttccctatgactaggacttactcttctgagatgggggttgaggggagacttatctggctaattctgaggtctttaagagggcatggtaaggctggttctagaagtgttggaaagcttcaaaatataaccaaccaaggccactggaattgaaccactagtacttgggtgaagaagtgccactggggaaagagccacagaaaggaagtagggtacaagttccttcttcctgccccagcttcctaatgccccatatttgtagatcttgggagctggttggcaaaggaggaatgcagtttgcagaggctcaatcccaatatcacaaaaaatggtatagaagatatgggattgagactgagcggtgataacataataataagtacaaaaaaactgaatatatttaatcctggaaattatttatacagatttcaaaagaaatgaggaactgaccagcagatagtaacatagtccagagatttgtaacagcaggaagctactaccacctatagactggaaagccaaaggtggggttactagaactacagccaaagtgagcccaaccagtggaagctggaaccatagaagagatgcagctcacactagagactctgtctgaggcaggggagtggagtgagagataccttgcatctgtcaatgcttcccaaccagctgtatccatcatattcttcaagtaatgattggataggtgtgatataaagagtcacaaaagagtcaggagtggacttgagggtaaacaggcttagccttggtacagaacagaagcacattttgttagcctcattcttattgtattattatcattgtgagatacatgatctcctaggggctttcattttcatggtcagcaccatgcaaagcatcaacttgttgtagtccatgaaagatgaaagtaattgatgttttagagttctagggagtagagattctgttgtacaaaatgatcttctcccttaaagccagatgcccagatttctctgggaactacttctggcaggtacactatcaaacacgatttatatccccatatccctaaaaccttacgcactgaagtaggatcaatgcctcttttcttcacaacactgttcagttctgccatgaaggcagtgatcacactctattatagttggctctgcatgtttctgtggcatccactggacagagagtcctgtgggggaagaaatagatgtccctagaatgggatataggcatggcagggaatgtttatttgttgaacataagtagttaatctttggcaaaatagcttcaactgaaaaatttgattcttttctttagtcatataaaaatatcaattatgtcaaatacgtaaaatttatcccataacatgctaaatactgagttgatataaaagatgcttggggttagtttaaaggacattgatatcacttgtattagtttgaattttcactggtgttttgaacatggcataatagactatgtcttgcttcatccttttttcattaaaaatttcccaacattttattatgaaaaatttcaaacacagaaaacttgaaagaatttcacagtgaataccagtatacttatgacctaaattctaccatgaatattttattatccttgatttcttttttttttgggttacctcatgagagttattctactttctttttttatgtatgtatttttattatactttaagttctagggtacatgtgcacaaagtgcaggtttgttacatatgtatacatgtgccatgttggtgtgctgcacccattaactcatcatttacattaggtgtatctcctaatgctatccctccactctcccccaccccacaacaagccccagtggctgatgttccccttcttgtgtccaaatgttctcattgttcaattcccacctatgagtgagaacatgcggtgtttggttttttgtccttgggatagtttgctgagaatgatggtttccagcttcatccatgtccctacaaaggacatgaactcagcattttttatggctgcatttgatttcttatttatcttctgatgtatccatctttctactagtttatcaatacagctcaccttttggatgcatttcaaagtaagttgtaacaacaacacacttctccataaatagttcagcagttatattattatttgtagttcaatacattgtatagttctttgatttctttcagacatatactgcacaagtcttacatgcacactagataagttttgataaatgcattggctttgttgtgaaatatgtttataacatatttctagatagggcttggaggtacatttagcctgttaggtggattagtttttaaatatttatgttctttgcaagggtaggtgctgcgtctttattggtctgtatactataagtgctgataataatatctagactaaaatgttgctcaaaaatctgtttttatctgtttggttggtggaataaactgattataatttttaggttccatatagtaatggagtaaaaggagtgcttgcataaggaatttgttacatggatgctagcatgcatttgtacaaaaaatacataacacacttaaattccacatatgaatctgaataaatatggagatctgaatttgttggatattttattgacttgttaatgagaatgtgaatatgtatctgcaatatatatttttagctatttaagcagggaaatgtatttaaaacatatttgatcatttctttaagtctctatttcatagtctttttctaagttttgtctataatttaaattggtctatataatcaatgtacgaatacatagattatagtgtgtgtttgatgtgacaatacatacaattagtgactagagcactgggcaattgcctgagtatatttgtatttatctgtttgtatgtatgtaaatttgaatgaggcaatgtgaatgttagtaaataaatagttaaataggtctaagggggtatctgtgaaggtctcaggagagctatggctatttatgtttctgtgcatacatgtatgcagtgtgtttacattccctgatcaaagaaggattaacacactaatagatatggatgattacatcagggataattgtgccaagaaagatattctcctgggagcaattctcttatggcccaactcactcttcactgataccaccttcccagttatttccatggtccctcctcccaccacacacaagcaagacttggtgttctggagggctcataaatttataagtcttaggagaatgagctgatgccactgccagctgtacccacagcatagtatatccagctacaaggaaagcatcttccatccagtgagtgctccctgcttcacactgcccacctgacctctttatctagattttattctaaattttaacacttttgccaaaattccaggcagcctttaacccttatatctccccttctaaatgtgagccaaatctgaccccttccaaactccaggatcacagacacctgatgccaggtttccatctaaatcaaaaccataataccaaaccacatatcactgagttaaggtactgctgcatcatttatagatttttgtctcaaggatattttatacttcttatttaaaagcctacgatttgaatgtttgcctttgatacctgacttttgtgtgtacagctggagaaaagttacagaaccaaatgactgaagtcatttaacaatgtagttgtcaatcttagctggattttcagtattgtgtatgtcagcatatatgtatgtatatgggaaaataattggtggagatattattgtggttttgttaatgctgatgcatttgtgacactgtgtgtgtataaacatttattcaggagagcttaaaaataagagaatatttgaaatatattgcataataccaatgagtcttcctaagttgttgcatgatagtattttgtgtgagtaggggagtgtttgatagtttgtgtgtatgtgtgggtatgagatagtgcctataaataccgggtgtgtaagtataagagtgtaaaaatgtatatttttctggtacctttgagtgactgtgtgtgtgtgtgtgctcatgatattctgtgcattgcttgtgtctctccaccttcttgaccttccttccaagataggtcacatttaggaagttttcatggacactcctgtggacaaagcaaagaaaaaatgttttgggggtggtggtggggaattttctccatggaggaaaagttttcaaagttgctttgtagactgatgaaaatctggaaaatagataaaatattactttctagactacctcaatttgcatgccagtggttacagacgggggtaaacctatcttgtggatgaattcttagaagagtctttttatttcttcatgactcagagaaaatcttgcagcaaaggtaaagaaaaaaaaaaaacagatctgaacaggctagatctaaaaagacctcttagagacatggactttaaatgtgggtttaggggaagagaggtttagcaaggagagtagcccataaggagaaaacactactcattaaatggatgctttgccttttcattgggaggagagagaaaccaaaggaatagatgaatctcttctcactacctatatatatttgggattatgactgatatctcgatatgatccagcaccttgtcaccatctaatttcactctgtttatgaggagtggtaggaataaaatgggaactctaaaatgagaaaaataataaaagagacattatgctgaaattccagaatggaggtttaattttgagatatcaaataccatgaaaatatagtagaagagctattttaaataaaggttgagatgaagtctcttatggtgtgacttctcagtttgcatcattctgactattgtttattttgcctgaagttaggctgaggctgcttaaaaaaaagacagaaaagataattcagtaaagaaggcagagaaggagaagccaaggaagaaatacaattgtggacaaatagtacccttgaatggagaaggtggttctaaacaggtgagttaaagacagtgttaactgtagcaagaagatcaagtgaattaggagagagaatgttttcattagattcagagacaaagaggtcactaggtgaccatagagaaatttgtttcaactcagaggaggggagtgtggaagccacgatataatgaattgagcagtgatagaaggtaatgtaagtaagattgaatcccgacatcgaagatctcagaaacaagctggagaagcaggcaaataactaaaaaataataatgataaaatacaagcttctattttcaggtacctggagagacaatttttcaagaaatttggttaagaattgggaaagggtcatagagtggtgggtagagaagaatgttatcgcatctttatgatggaatagtcttgcacatacttattgtctgaaggaaaagaggcagaaagggagagaatgaatatccactggattagtgaaaaaggctctgaaggagtgacaagaaatgaaatcctgaaggtggagagcctgtccttggagaaggagagaaatctctttctcagaaaatagaggttaagaatgaataaaggtgtgtataagtttaaaattttggtaatggttaagtaataattttctctttttttattcccataaaatactttcttctttggttttatccagctgcatacctggtttgattgtagaatttattaaaggttgcagtttactatatgaaggtgaaagagagataaagaggagatgaaaataccagttttagtgtgggtgagtagttcaggagaaaagtgaggaagaagagttcatagaccagaggaaaatgggggaatcatggagactcaagagcaagtgcacgggcatgagaaggttggaaggtagaagcctagagtaaggatatgaaaacagtaaatttaggatttcagggatagaaaagtttttggctatgacaagttcaggggcagccattgggattgggaggctggggtgaagtctgagctacaggttattgaatctgtaaatttatagtagtagatgttccatctatgctatctaccaaagactttccaaagcctaggatgcatttcctctttctggtctaccagaagcaattgttaatgttgtctcctattatgccttgctatgttatgggcactcatttgatcatcaaaccacagagtttctactatggcctagatagtgagcagggccctggtggtacacaaacgattagaacccggttgcttccttaaagagatgagtgtcttactgggaaggcaggaatacaggcaatcattttcaatctatgaccttttgttggagacaggatatctgaaagaaagtgaagaagtttcccaacacaccctcttgggtccattccctatctatattctcccaccatgctgggtctcaatggcacccccttccagccagcaacactccagctgacaggcattcctgggatacaaacaggcctcacctgggttgccctgattttctgcatcctctacatgatctccattgtaggtaacctcagcattctcactctggtgttttgggagcctgctctgcatcagcccatgtactacttcctctctatgctcgctctcaatgatctgggagtgtccttttctacacttcccactgtgatttctactttctgcttcaactacaaccatgttgcgtttaatgcttgcctggtccagatgttcttcatccacactttctccttcatggagtcaggcatactgctggccatgagcttggatcgctttgtggctatttgttatccattacgctatgtcactgtgctcactcacaaccgtatattggctatgggtctgggcatccttaccaagagtttcaccactctcttccctttcccttttgtggtgaaacgactgcccttctgcaaaggcaatgttttgcatcactcctactgtctccatccagatctcatgaaagtagcatgtggagacatccatgttaacaacatttatgggctcttggtgatcatttttacctatggtatggactcaactttcatcctgctttcctacgcattgatcctgagagccatgctggtcatcatatcccaggaacagcggctcaaggcactcaacacctgcatgtcacacatctgtgcagtgctggccttttatgtgcccataattgctgtctccatgattcaccgcttctggaaaagtgctccacctgttgttcatgtcatgatgtccaatgtctacctgtttgtaccacccatgctcaaccctatcatctacagtgtgaaaaccaaggagatccgcaaagggattctcaagttcttccataaatcccaggcctgaggaaggctgaaggccccaaaagctcctttggaggaaggattgggacatgttaacaacttaaggaatgctaaagtaaggatgaagaggacccaggatcttgatagtagtgaatgtatcactaataaaataatatttgactataaaatggcatacatatttattcaatacttatgtgaaaattattgtgctagttgctactaggcatgttataatggtgagtatgaaatattgtcaagtaaccagatagacatgtgaagagaaaatataaaaaagagccatcggtatcctgaaaaattcttgtttgacatatacgggaataatgaagttcagcagggcaaacagaatttatcaaaaataattctgctcctgcccagagtgaaggagataataaatattaaagagagacaaaatatatggaggctttgtatttaatgcaagagagaagatctactttgtttgtggtaataaaaacaggctatgttgagtggttatgaagtagcttgtgaaggatgagagaagttagaattcttgattcaggatggcaggaagaaagaagggtactgattttggcagagataattgcctgagaagaaacacttaggcagaaacgtttagaacagtactattccaagtatggtctactaaacaatatcattgacatttctggtagctttatagagaaacagattcttaggccccacataagtcctactgaatgagaactgcttttgataagaaccttgggtgattataccttgagaaggacaatgtttctcttttctgacagcactcaggtattagattgatgcccatctgctgtgcaacaagagtaacaaaactcatgattaacaagagtttggaaaagtggttctcgatatatgatttccagatcaatatcatcagctttgcatcgaaacttgttagagatgcaaattctgaggactttctttagacatctgaacaaaaaactatcaggagtgagaccaagaagtttgtgttttaatacattctgcaagttatttccatatctattaaaggttgagaacttttaacctagaatattggttacagataactgtttagacaaacggggagtttccaactgggacactggggcacaaggtcttgagagattgctgaagtaaacttgtgaatgacttttaaagtgggaaactcagtgtatcacaattaagcatatggtattgttggtgaagggaagtagagtagatttataaccttaatatctccatgagacagtgcaggtggaagacagaaatagcttcagaggagaatttgatacacaatttccagccaccccacagtcataatcccatattgtgctttccttcttttccctcaattcctacctcctgtcatgccaaactacttgacattgaaaattcaggcaaactccaactttagggctcccattcaggcaaatagaactggaagagagagagagagagagaggacgagagagagagaaagaacagttgattgtcatactgagatggttaggcaagagaaatttgtcaatggaacttcactgtacacaagtctcctgatcaggaagtcttcggagacttttctgcaaatctattaactctttttcttttctgcagtctattaacttcttccctctttagatgggatatgtttaatctggttgtatttttgtttaccaagcgtttacctgcagattgcgtctatctctgctttgctccattgttaaaagtttaacttccactccacaggatatatttatttctctatttaagctttgttgtggggaggaaagcttcaaaatttccccacaaatgacgtttaatacaataagccctcgtcttgagatttgcatggatgttttgtttagtattaccattatcagagtgaacaaatatttagagtttttcttgacttatgccctcatttaatggaggcagaaactgagtttggaaaaagacattttaaatatctaaaaaagagcaatagataatggcagtccaagctaaaactctgcactcagcacagagttggtcacaccagtacatgtgaattaagggaataaccaaacaactatttaaatgaatgaaaaaactggatccagtctgatgtttagatccagatctgagttttaagctcggaattcagagatctagactctgggttctgagcacagagttgcacttttgagactggataactgggggggggtgttgctatgaagtttggagaatttgtctccaacttcttcattataaggaaggagttgaaatttcattttctcagtggagagagagggcagtatctccaggtttgttccccttcatgctgcctctaataacatagctagagtcattttacatcatgacttctcaaagccctgcctctccttgccagagatttatgcccaatatgaggcatcatttgtttccttctttgtccatgattctgtgacctaacttacaaggtcatgattcatgattactcctgaatttcatctcctggttcccaacgcataatttttgatccaaccaatcctataacaataatgaaaagtagaaggtgttcttctgccactgttcctctgttcctttgatatttcagtgctccacatggggaagagaacattacatcttctatttccctccctgaaccatcgcaccacttgatagaaaagggagagagccttcctgctgttccttctctcaatacaccctcactctaaaactgagatgaacaagaagtaaaatggattatttaatgggaagttcaggtgttgggaaaaagaatctgtttgggagacctgaaatcaaaacccgcaagagaacttaacgataactagcatgtgtgataaattcaataaaaagaaacaaacctatgacttccttcttctcatttgaatctcaatcccttgtagttaggtgctatccttttttataaatcaggttcaaaactaaaggaatgttaatcttctaaaatcaggtggcaaggccaggacttaaaattaggtctgtatgattttgaacccatggtccttcagtatcctggaatgtttcttttggaggagacccttaacttgtagtaacttggcagaccatgggagtgggagttcaggagggaagtgtaggactaagtggattgaggcagtcaggtcatatcctctctggcttaaatcctggggttgtctctggccttcaagctccagtctctgagatgtgagctctggaattttcccgttggaatctaagctttaggttttgcctgagatctgagttttaagctcagaattcagggatctagactgtgggttctgagcacagagttgcacttttgagactggataactgtggggggtgttgctatgaagtttggagaatttgtctccaacttcatcattataaggaaggagttgaaatttcattttatcagtggagagagggcagtatctccaggtgaagtagtttcttgtttgctttttcttatctttttattcccaaggtaagatctaaccctcctcctttccccaataccagcacagcatcacactcaggcaaagcaggaccccaggggctctggcatctgggaacaattccgcagaggcataaaggcagcctcctctcttggctggtgcccacctgaggtccattctagagccattgtgagttctggtcctctgcctctcagtccaactcacacttcacaaagctccctcaaggtgatcaagacactttgatcagtctgtgtctttgaggtatgtatacaataagtgtgtttctagctacaattctgcttgtgcttctgtatgtttctctcagattctctcatcatgcctctgtatctttgagtgaatctctatcaatgcctgtgtatgtttgcatagttgtgcacaatttaaaaatcctcaaacctcacttttacataggttttctatagaaagaacaatattcattcaaataccctcatggtctgccagccactttcagataaagctgccagagactgctttagcagtgaaagacacatgggtgatcacacagcaggggttgagaacttgcctctgttctgtcccacacagatccacagacatgagattctgtcactgaataggagacaccttgcgagtctggaatctcaggcctgtgagcagaaagagagctgaaagaccattaacctcgattcagcagatgctgacattctccttccagaactttcatgaagagttatccagtctttgcttgaacaccttcactgcccagaagcttattatttcattgtgattttagaaaagtgtttcttacatgaaccccagactgtcaccctgtgatctccacctatggctcagcacctgtcatactgatcccaacccgtctctactgcagtctcctctggtcaaaatgaagcatcactcattccttcagtgtccttaatgtgacttaattccctttactttttgcgtgtgatgcagtcagtttaactcctatttagaatagagaaccaaaaactgaaggtacttcagttacagcctaagtagtatattcatcttttattcattaatgatttttttagcatatctttgtgtcagaatcatgtcgtgtgttgagaaggacaggatgaaccaggcacaagtctgatcctaaaagagctcaaaatctgacaggaaggaggtataaatgtaattttaataaaatagaaaaagtctgtacaaagtattacaaagttacagataagaaagttattgtttctgctaaatagtgttagaaaaaactacagatttgttttaagctatatatcacactgctgattcatattacactggactattgattggtcactctgacaggaggacttttgtggtgcagaaattaaaagtcagacacttggagaaatagctaaagggatttaggacaggttaagagaagaaggaaagattacaggatatcaccatggaaacctcagatactatttattcagttatttattcatccagttaaaatatttattaagcatctgttaggtatttgaccctgtgctagtatgggttatctagtgataacagacaaacaaaaacagtcaatatcatccattcttcttagaatttatggtctggtagggatacagacattagataattacacaagtacatacatgtttacaaattaacataagtgttctgcaagaaaataacatattccatgagcaatattcagttaatacttgatgaagattattatgtctctgagtctgcaacattatctataatgtagagaaagcacgtttaagaccaatgtgagaaagcacttcatatccatgagatctgtccaggatagtggtttagggatgcgataaactccccatcactgggaatgctgatgctgagcatgggtgacaattgtataaagatggacattctctcagtgggtacaagattggactcttgattcagattctagagagcctattaagtttatcactgaatatatagccttttgagatggggctatttttcaaaggtgacttaacccctgttccccaccacctgacctccagtttgcgtaggaggctagaaaaaaaatctatctgccattcagtctttttctctgcctggaaaaataaagataaccgacttctccagcatcttcccatttttctcatttagatgtcttttgcttcagaaggttggctgctggcctttatagggaagaccatgggacttataattggaagaactagattctagtcccagatcagccacttacgggtttcaggcaagtcacttgatatggctgttatgagattgaaataaggcatcttaggagtgaagaaattgcccctctggttgtcattttccatccacagattgagttaatcttttgagctatggtctccttgacgttgccaatcttttcactgtcctgcatgttcctcttttcatggtccttcgaagtcttgattcttacttcctgctgaagatgatgctttaccagggaccagcatcttcaggtgaggcaggtcaggatcttcaggagagataattagacagattcaaaagagtcctgccaagcccttctgtcccttaagtgaccctctagagaggtgcactagccccaaaacctaggctacatctgtgggcaccaccctggagtgttataagcaaatccaagtcaattcagaggagcttcaggatgctgagtggtctagtggatgatgaaacacaaataaatgtttaacttgtaggtccagagtggagtaggaaagttatctgaaagtcatggagggagacagggagagcttgcaaatttcattttagtctaaaatgctgtcactgtaaaggggctggaatgttacaaaatgaatctggagtggttctcaacattgggttcatctgaggagctttaaaacattgataattaggtactacaccctgagattctactttaatcggtatggggtgttacctgagcactgggatttttaagttcttcaggtgattctgatgcatagcaaaggttgagaaccgctgatcaataaggtagactcaagataaataaattggtaagaggcacaaggaaacacatttcacatgtcaggaaagtcattaattttgagagaggacagagttcagcagagctggtgcatgaagagtgtagagagtaagagaatgcaggacctaggatcattctcataattacattgctcttgtctccatagtcatagttcttttttttttcatttttagatgtaagatctcattctgttgcctaggctgaagtacagtggtgcaatcatagctcattgcagcctggaactcctggactcaagtgattcttctgcttcagcttcccaagtaactggactacaggcatgtgccaccatgcccagctaattttttaatttttaatttttagtacagatggggccttgctatgttgcccaggctggtatgactcctggaggtcatagctctttgtattcccttgacagtacattctcctgaccatacatttattccagcagggcatttttattaaacttttcagatgtatgaacaatttcacatcaacactgggtaaccagaggataaagaattggtgcaggatcactgactcatacatcaaatctgttgagtgaatgtgtgaactggtgattggaagtaattcagtttttataccagtcatgagcaccccttcctacttcactgttattgtctttaaaaattgattttataaatttaatttgttatattacattaactatgttacattgtattatattacattatatattatttcaaccttctgactgggattagctatttctctctgatctcatggccactgaaggagtcttgtatctctgtgtctttgttttcatctttgcatatattcttggttaaatatggtcttttagaagccactacatctttgatagttttcctaaactctgtttgtttctaactcagaggtaacttgtgtattagcataattttcacctgaaatgtttatatccttcattgtccatattcctatttctccctttttcagctttttaaaaccatagtctcactttcattcaaaacatttttccctctctgaggtggaatggggatacatggagatgatctttactaggggttcttcccttctaaggttcacgttgtcaaagctaaaactcagttctttctgatgactccaacctagatcagaccacagtttactctcatctccatagtgaaattggtaaccttactacaagagaagatcatgaatctaaactgtaatctaggctctgcagaaactgacttttaagctgtggcctgttattcaatttttctctctgggtcctagtgtctctctaagaataaaatatcttactcaatatcccatgtaatatcttgcttatcctacaaaaaatctaaaaagcaagtgtattttaatccccagtttacaggtagagatactgagaaaattaatgtcacatgttcagtaatttgaagctctgcaaatggattctgaaagactttagttcaaaatactgaatatgtgacattaattttctcattttttcttacaaccagaaagaatagtattattacattcatgtcacaagttaaaactcaaaccaagccaaacaaaaacaaaataaaattttggatcagagtataaataagttgaacacatcacacatctagtaactggctgagtatggattttggctcaggtctgatttatttattccaaagtttctgctcttaatttttaagctatgctgtctttcacaagattgagcagtctgaaatattgcatgttcctgctcaaatgtgggagctaaaaaagttgatatcatgtaggtagagtgtagaatgataatcaccagagggtggaaaggcatgtgtgttaaggataggagaggctggttaatagctataaacacatagttagatagaaggaattagttctaatgtttgatagcagagtagggtaactagagttaacaacaatgcatatttttcaaagtagctaaaagagaggaatttgacatgttcccaacacatagaagtaataagcactcaaggtgatgaatatcctaagtacttcgacttgacgattatacattttatgcatgtgacacaatgtcacttgtatcccataaatatgtacaaatattatgcatccataaaaagtatttaaaacttttttaaaaacttaaaaagatggagcagtctgaaatatctcttttccaagtaacatttaggattctggaactcaggagaacaggaggagagaagaggatgtctgttatacttttattcagaatgacgtagatgactccaactttcttgcttcctgccccatctcctttcttcaacttttcaggttggccgctaaggcagaagatccaacggttggggactaacttcagtttttttcaaatggcaggcgaagactgatctctgctgttggtggcatgggagctgaaagcaatgaaagtcttgacctcctatctgtcttcctgactggcatcccaggactggaggcccaacatggttggctctccatccctttcttcaccatgtacattgtggccattgtgggaaacatcctaattatggcagcagtgcaggaagactctgccctacatgagcccatgtacttatttctctccatgttggctgtcactgaggtgggcgtctctgtgtctacactgctactgttacaggcattctttggtttgatgcccacagagttgactttgatggctgcctggcccagatgttcttcattcacaccttctcctgcatggagtcaggggtcctactagccatgagctatgaccgctttgtagccatctacaacctcctgcgctatacagccatcctgaccctgccccgtattatctgcatgggtctgggcattacactgaagagtgtggcactcatggccccacttccaatccttttgaggcaactgccctattgccacactaatgtcctctcacactcctactgcctccactcagatctgatccagctgccttgtgcagatactaaactcaacagcatcctgggcttagccattgttctcgcaaatttcgggctggactcattgcttatcgtggtctcttatgtcttgattctttatacagtgatgggcattgcttctggagagggacggtggaaggctctcaacacatgtgtgtcacatatttgtgcagtgcttatatattatgtgcccatgattggggtgtctgtgatgcatcgtgctgccaaacatgcttctcccattgtccacacacttatgtctagcatctgccttttggtgccacctgtacttaatcccatcatctatagtgttaagacccagacaataagacagggaattctcaccttgttttcctgcaagagggaattgctctgaatcactgcaaggagtcaggaactgtcattaaattcataaattccgataatgtttctgctatgggcaaagctctacattaggcattttgaggaggaataggaacaaggaattcaaagtattgcaacaggcttgaatctgaaatgcaagagttattcctaaccctttccatctcacattttatttgtgtatgtgtgtctctgtgtgtgcacatgtacatgactttctcttctaaccagatatggtgactttggggcagaagtaatggattttccttttcctcattttctcaaaactcctagcaaaaaagcctgacaaatagtaagttaacagtaaaaacttgagacttaatgaaatttaaatttaaataaagcaaaattctatttttatgggttaggtagggattacctaaccatatcttccaattaaaaaaatattatcctaggaacatgtctttgagtaaggtgagcatgctctctggttttctccagatattcatggtttacatctgttttccttagcattattattaatgttaccttcttttactctcaaaaatgttcttgatcaaacaataaattgtttatttttgtttacatttacctatgaagcaacttcttgttatgtaagaaaagagactcttcctaaaacttgctgtccagtggtctcacacccagaatttatgtaccgacactctgagaatgaacagctgaccaaaagacctcaactgaagcatgaaataaaatatgaacaatgtcacaatgcccaggctacagattctaagaatctcagcaaaagcagcaaattcttctttagtagaatcccaggctcaattttagataaacacttattggcaaataagtctgatatcactgttcctggctataccctttttctatttcctcccttcctttcatgcttctgtggctttaccgtgcatgtggtgcttttattcttatctgttccccatcctgccccttcctcagccccataatcatgggtctagtgggtcccctcccctctgcatctgcccatgtttgcctaggcttcctgcaaaccttggtcaagtgggaacgaccatcttctcatctcctaaacacacaggcctttgtataaagtgaatttatggaactgtgctgattgatcagtgattagtgtcactgatcattcgcactcactttggggcctccaattacaatgaaaatattgtcctcaccacatattattctccttgactcatccagcttacaagggttgtctttgtaaggttgtctgtgacttttttgaaatacttagtgtgtttgtagtcactgattggttcttccagcccactgcacagactgagaccctggtattgcggtgaagaatttattgacactagccacacaggagatggagttattactcaaaccagtctccccaaactctcaaaggctggggtttttcaagggtagtttggtgggcaggggactagggaataggtgctgctattgattggctggggatacaataataagaatgtggaaaatggtagtcatgtgctgagtctggctctgtgtgtggtgggtgcagaggaccagctgagtcatgagttacaagtctggatggggtcagtctgaaaaacatctcaaaacaccaatcttaagttctacagtagcaatgttaactataggaccaattggagcagtcacaaatcttgtgacctctggccacatcactttgaagcagtaagggacagtaaaaactatacctacattttagcagaattcaggcccctctcttatttctaatcctgtagtctttcattagccttacaaaggtagtttcagcctctgaacaaggaggtgattagtttgggggagggactatgatggtccttgtttctaagttaaactataaactaaattctcttatggttagcttggcctatgcccagaaatgagtgaagacagccaggctgtgaggctagaagcaagatggtgtcaatcatgttagatttctctcactgtcataatctttgcaaaggtggtttcatatttacaacagtagtcatccaatttttgtttatgtactttctaatataaaaagctaaaacatatctatatataagcatggatcattttacatgcttcactttattgtgcctcatagatgtcgcattttttacaaattgaaggtttgtaataaccctatgttgagcaagtctatctgcgccatcttttcagcagcatatgctcattttgttagcatttttaaacaataaagtatttttaatgtatgtacatttttagatatcatgctactgaacatttaacagactatattatagtgtaaacataacttttatgtgcactgggaaattttaagtatgactcttttttttgcaatattcactttattgtggcagtctggaactgtacccatattatctccaaggtacgcctatatcttctcaagaatattcagattgatatttaatttttttatgataaatttacttgttgagcatgtcttttgggatatatatagagtattataaatatacttagtttaaagtaaattgttgtatcacatctttaaatatccaagaaaatctaaacacataatgttttgatacctgacatcatgaatttaagaatacatgaacatgttctttaacagtcagatattttacatcagtacctttttcctctaactgaaaattttattttacctccatcaaaaagttttgaccatgcactgtatatttatatttaaaactattttaatattcaccatatcataattctttgcaataaaaatgtacataatttaaatttgatgtttaaaaatagttgaagttgtttttattttctaatatcattcccgtatgaaatataatggtagaaaaacattttaattaccagaagttttaggtttatttttctcatcaaaaatctaaattttgagcttcagtattttctatgctggttttatttgtcagataagttaaaattatttccaaagatattcagttttatgttaattcatgtgtttgttcctactggattgtcgtcacttctaggtgctcctagcttacagagcaaaaaaaatatgtcagcatactaaactgtgcatatacaaaatctataaatatttctgtgtttatctgcatctatattaggctaaactgacatcacactgatgtcttcaactctaattcatggttcattcaaggcttttccccttgtgtctgtaaccttctactctaactctgaaaaacctggctcacgccatctgtcattcacttcacttacctaactgttcaatttcagcacacatgtgtaggggcagggagaacgcctcactttcattctctgtgaagattcactggaatgactgacaacagacagattaataggataaaaggcatatgaatttattaatgtgcatatgcgtgggagccacataaaatatgaaactcaaaagaaaggttggacggtcggtatataccatcttcataggggagaaggagaaggggaaatgtaagcaattgtgaggggtagtaaataatttccaggggaaatgaataactcaaaagaacaatggactaggacaaagttcctctgtgctttgggggaggtgatgggaaggtgagtagtggaacttcactgtgaacaaatgttgtctcatcgtgcagataatgtctcccaggtaatctctcaaagctgtcttcagaagaatagatggaaagtttatctggatgtgatgacaactgactttagtctcttttctcctgtggttaatctttcctggttatttggtaagagtcctagaaaaggagttttaagataattgcatttttttctggaggtactttctgtaatcagatgagggaacttcagataagaaaggggatgagaaaaacagggagacagagagagaccttggttttgaggcttatttataaggactttcagttttgtttaatttaaagcactcaacatgccaaaaaactatactgtaggggcttttttgtgccctaacacatgtattagggcggtgttaatccacaccgccatgagaaactgattcattaagtagggtagagtacatactatacttctttttgcctttagtctaacagatttcacctatttccaaagttacttaggtcagcaactccccccttccccggaattatttcagtgtggttgtttcatatatttaataactataagagagttagatttttctggtcacattgtgcatttcatcctgtaatcctataatgtcttaaataatttttaaattttgtttccattaaacttcatcctgtaatgctgtaaattccatagattttggtaagtgcatagtgttatgtgtgcaccataacaatatgatagaatgattccaccaccctaaaaaataaaatcctcgagcttcacctattcaacacttcactttccccaaaaccttgactaccattgattgacatactcactatagttttgccttttccaggattctatttaaatacaatcatgtattttgttagccttttaagacaggcttctttcacttagcaatatgcattttggattcattcgcatcttcgtgcagcttgatagttcattcctctttaattgccaaataatattgcattgtgtggatgtattgcaatttgatcatccatttgtttactgaaggacaccttggcaacttcaaattttctgtctcttttctttttacgctaattattgcaaaatgattcttaggtgtttggttgaaaatttgtcccttcttctatagtagcaggctaggctagcttctatttgaactaatggatccatttaacatctcaaaaaattaatatccaatcttatgtcctcttaaatagctaacttaaaataatttacagagggtcaataagatacaaagaatattacattcttagaatcatactctatattttataataaacacatttctataacaaaatatgaccagtatagttatttgcgttttaggtacccaataattttgcagacacatttcccaattaaaaaaatttacaaaaatgaaatctatttcaaaatctaaacatatcatgatgttttaaagtcataaagccctcctcccctcgccacacacacatgcaaaggaagaagacaataaacagtttatctcaagaaaggaaacagaaaagggagaacaacaaataatgaagcagactacttgatttaatcttcatctgatttctagttaagttttgacttgttagttcatctctgaccacaaaattgcatcgatagatatcgctcatcaagacattatttatggtagcctgtgctcctcttttgaaaaaccaacataatcccaaaatttatttgctccacatgctgttctggagcattaacaagcctgtacattgacaaaaattttcttttgacccatatttctatccatgttcttgacttttttcagcatttggattttctggacttaaattctattgtgagaatgcacatcttccattttgcaatttacgccagcagacccatgtttctattaaaaaatgctaacttttaggctctagcagagaaaaaataaaacatgaggaaaggatgtaggaagagaaagagattcctttggtatttgctttctgcctttcacttcttttttttttttttttgaggcggagtctcactctgtcgcccaggctggagtgcagtggcgggatctcggctcactgcaagctccgcctcccgggttcccgccattctcctgcctcagcctcctgagtagctgggactataggcgcccgccaccacgcccggctaattttttctattttttagtagagatggggtttcaccgtgttagccaggatggtctccatctgctgacgtcgtgatccacccgtctcggcctcccaaagtgctgggattacaggcgtgagccaccccgccaggccctgcctttcacttctaatgctacttacagagacaggaggcagccaggggtccccagtgaaaccctgccttcaaccctaaataacagcctgaaggctgaaaaaccagactgttggtcctggatgaagcctgccttttcctgactgattctttctgaataatgcctacctgtgtactgggaggatggagggcggcctcaggaacttcatgccatttgcagaggggaagatcctggcctctcctcttcctgtgtggtgacctgggattcaatctgtgagtcgggaagcctggtagcaggactctttcatcttgctgaaaggtgtttttttgtttgtttgtttgttttttgtttgtttgttttgttttcccttttctcttttccccgaataactttcattttcctcacccttctatgtgtctacgagcctaatccttcctggttgtgtgacaagagctcagttttagcggaactaaggagaaagttctgtaacactaccttccactgtgctcccactgcctatgttgattcaaatctaagtggatcccaatattgaccacctgcaccatgaatccagcaatcagaagctgtgatcaaatttatagttgtcccttcaaaccgatattgctgggaaagtttatcttgtttccacaaaatattttttatgatccttaaggtcatatcactgtactagaatatttgctcgtgaaaaattcatgatgcccaaggaaatctgcctgtaagaagcagagctacattaagaacataaaagtatgaaaaaagtctgctctggtccggaaaaaaaatgagtttttcttcccacaagaaagaagtttgaattctgaatactgaaaaactctagcaaggtaggaactgtgaaaagtcttaaaaccttacactaattttagacttcttgcatatgtttattttgcttgctgagtgtttattaggtaaattaaattacttgggtgttaggtaaatctgaatttacctaattcagattaggtaagtgctggtgttaattaggtaaatctgaatggcagaaaaacttgatgtgtctattgtccctcaaaatgttatcattcctttgcaaaggaaagtccaatcacccgtgagagtgacccagaacagaagatctaatgtttacctaaatgcctaaatggaactgcctaagagaataggtgataggggcaacaacaggatttcctttaaacttctgggagtttaagtttaaacaagcccgtaggagagaaaaatatccagaaagaaagacaagcttcgagagaactttactcaatccattaaaatcctcccgttgggatagctgctaagatgtgctagaattttatcaactcagatccatatctcttttgcatagaatcactgctgctagctcacctcagccaaaaattccatgctaaaagccagggacttgtcatactgccttaatattatgatgaagttttattttatagtttcctaattctgaatatattccccccttaagcctatgactcatacttgtcagtaatttaagaaatgcattccctcatcttgaatgcatatttttgagggaaaggaaatttaacattccccattggatctgcttgttctttacactgtaaatgatggggttcatcaccgggggtgccagcaggtagatattggccatgataacatggaccagtggagaggcatgcttggcaaagcgatgagtcatagatacaccaaccatgggaatgtagaggaccaggacagctagaatgtgggacaggcagttattgagggcacggagtcgctcagcccaggtggctgtgcccaagatatttttcagaataagtgtataggagatcacaatgagcagaggatccacgataataatgagcaaggcaagagcaaatccataccagctgttgagcctgatgtcagcacagaccaggcggatcatatcctggtggaggcaataggagcgagagagaaggtgggagtggcagaaaggcagtcgcttgagtaagaaaagggagggaagaaccgccagaacacagcagcaaatgatggctaacccagttctaccaatgacttcattggtgaggatggaggcataatggaggggacagcagatggccacatagcagtcaacggacatagccaggaggacagaagactccataaaggagaatccatgaaggaagaaaaactgagcaaaacaggcctcagagctgattctacgaacgttgaaccagagaagctgcatgactgtgggtagggtggtgagggtgagacccaggtccgtcagggccagcatggagagaaacagatacatgcgctggtggacagatggctctgtgcgaatgacagtgaggatggtggtattgcccatgatggagatggtgtagagacagcagacggggatggagatccagatgtgggaggcctcaaatccagggatgtccgtgaggatgaagtagatgccttcttgtgtggtgttagtcacctgggacatgactgatgaatgtgtcttcagattcaggatcttcactcagggagaaaaagaaacattagaaataatatctctttgccccatttaatccaaattctacacaaataaatgttcagagttgttgagggtaactaaagcaagatttaagaacattgtgatatatgatatcctttccttagcccaattctgcagactgctcccacacagctaatcttcccttgatgacggaatatatattaattcatgggtaactctaatttttcctgcccccattttcccactcccattcagttttcagcacatttaaatcagcctttcatacaaatctcactatcaatactgttctcacaaaggctaaaaatgaactctattgtataaatgtgatgcttaatattcaatctttatctttttttgatataaatccagtgtctttttccaaatatctcctttgacttttgtagcagcattctcacctatttcactagttctaaacctattgctactttttcttcatctcctaattttttcattcattaaggttttattactgtactgcagtctatttctactctgtcctattctcattagctaatgtcttctgatattgattttatttctatgacataaaaaataactggaaataagggaggaaacataggaaagaagagaaagagaggaaatagtcagaagtctgtttaacagcccaggtgaagacaatcacatttattgagtactatctacatttaggcactgctttaagtggataactcgtattaattcttatgttctaacaagtcatgtgcccttttctttttcctgatgattcacagaggagtcttacctgtggtttctcctgccttggaggtaccctcgtcaccatctgtggcttctgttttctcagcttagctcagagagcaggtgcggtataagccccttgcagatctctagtctggagggtggaaggtgtggcaggtcgcttcaggattacacggaggcatcgcatcttgggacctgggtcccacagggagcccagtaaatcaactctggtggtgacagcctttgctgcccctggtgtcctcacagagcaataagttagaaagccatattgaatcacagtttcattagcttgttgaatgtgatttgaaactgcatgcttaagcttgaactgtacaatctctcaaaaattagttctaaaagacttccttctataagtactccgaagctgggatagagtttacaggggcaagagagctgtagttgaaagaaatattgtgcatcaatttcaaggggcattcatcttaacctgagcctctggaaacactaagaaaaaagaaatgtttatatatatgtacaagaaataaggaaatgaagacagaaatcaaaactgaattagaaaaaaaattattcaatagttagctatttggtggttcatctctcaattcccacaaaactaatttcaaaatgaattaagtaactaaatgaaaatcagtgacaaaaaataaaatagagaaaataatataagcatttaaatctttcctttgtgaagactttgtaaatagcagcaatagacaagaatcacagagaaagacaagtagatataatctttaaaagtgaaattttctctgtagcaaaaaatggtaaaatttaaacatttcaaaaatatttataaaaatatggaagagattactatcttaaatatcaaaaattaaatatatcaatatttatcaagaaaaatacaatagattaagaaaaactatatgacaaagttaacagtaaaagaaatacaactacaaagaagcataaaacaatgttcaactgcatccaaaaatgcaataatggaaagttaaatcgtataattggtgttttaaactttcaaaataacagagaaatttttatgacaacatgctatgcaaataaggaaatggcagtgtagaaacattcatactttcttaagtgtaatttgtatgttaatttctggaaaatgattcgatcatagatgccactttaattcagtaaatttacttctggtagtaaatgataaaataattttaaataaggataaaaccttttaatgaaaatagacttttatgtaataacaaaagagtagaaagagataaatggttcaaatattaaaaggcctatatatctatcacctatcataactaaaataaatatgcaacatttgttttcaaaagattataattagagcttatgtttctattaagcacattgaaatgtaaatagaaacataagctctaattataatctttatatatgtgcttacattctattgtaatcatattacaatagaaatgtgcttacctgtgctggaactatggtagttgctataaaaataatttcagttagtgctaataatgacccttggaaaaaggagctattatcatgcccattgtatataaactgggatttaaagaggttatgtcccttgccaaggtttcagattttgaaaaagagacaggaaaagtatttgaagtatcatcgtttctcgatgtgagaggttgtttccaggagctctcctggatagcaacatctgtagatgttcatgttccatacctaaaatggtagtgtttgcatgtagcctatgcacatactcctttatgcttaaataattttgaaatcactcatcatgactgatacaatataaatgctgtgtaaataattgatattctatattgtttagggaataatgacaggggaaaataatctgtgcatgttcagtgtagatggaagttttttttccaatacttttgacccaagattggttgaatccatgaatgtggaacccacaaatacggaggaccaactgtagttctgttgaattccaaagccaaagtacattaccactatgttcttaaaagcacttcttttctctaggtgtgcctgataactccttattacctgagatgctaaagacattttcattcctggatatagatataaattgggcactatgagtaaagcattagcttgtcatcatgattttgggatgtctgtgacacacaagtgtgcccccaaaagtctcattatggcaaacatagagaagataagaaatcttacatcatttcaaagataaaggggaatattttagacaatttgaaggagagtgaagatatatcaaaagtaagtcctcagatgtcatactaggatatagaattcatatacctgcacatgactcaaaaaatgagcacatgcctcaagaaataatcagaaactgccctattaccgatatcaagaaacactcaccaaagtatactgtggtgtctcaggaacttctagtgagaccagatgatgctttttttttttttataatacttcaagttctggggtacatgtgcagaatgtgcagctttgttacataggtatacacgtgccatgatggtttgctgcatctatcaacccgtcacctacattaggtatttctcctaatgctatccctcccctaaccccccatcccccgataggctcgggtgtgtgatgctcccctcgctgtgtccatgtattctcattgttcaactaccaattatgaatgagaacatgtggtgtttggttttctgtccttgcgatattttgctgagaatgatggtttccagcttcatgcatgtccctgcaagagacatgaactcatccttttcatggcggcgtagtattccatggtgtatatgtgccacattttcttaatccagtcgatcactgatggacatttggattggttcggtgctttttttgtttgtttgttttgtttttctttttgttttgttttgttttgtttttattattattatactttaagttttagggtacatgtgcacaatgtgcaggttagttacatatgtatacatgtgacatgctggtgcgctgcacccactaactcgtcatctagcattaggtatatctcccaatgctatccctaccccctccccgcaccccacaacagtccccagagtgtgatgttccccttcctgtgtccatgtgttctcattgtttaattcccacctatgagtgagaatatgcggtgtttggttttttgttcttgcaatagtttactgagaatgaggatttccaacttcatccatgtccctacaaaggacatgaactcatcattttttatggctgcatagtattccatggtgtatatgtgccacattttcttagtctatcattattggacatttgggttggttccaagtttgctattgtgagtagtgccgcaataaacatacgtgtgcatgtgtctttatagcagcatgatttatagtcctttgggtatatacccagtaatgggatggctgggtcaaatggtatttctagttctagatccctgaggaatcgccacaatggttgaactagtttacaatccaaccaacagtgtaaaagtgttcctatttctccacatcctctccagcacctgttgtttcctgactttttaatgattgccattctaactggtgtgagatgatatctcattgtggttttgatttgcattcctctgatggccagtgatggtgaacattttttcatgtgttttttggctgcataaatgtcttcttttgagaagtgtctgttcatgtccttcgcccacttttggatggggttttttttttcttgtaaatttgtttgagttcattgtagattctggatattagccctttgtcagatgagtaggttgtgaaaattttctcccattttgtgggttgcctgttcactctgatggtagtttcttttgctgcgcagaagatctttagtttaattagatcccatttgtcaattttggcttttattgccattgcttttggtgttttagacctgaagtccttgcccttgcctatgtcctgaatggtaatgcctaggttttcttctagggtttttatggttttaggtctaacgtttaagtctttaatccatcttgaattaatttttgtataaggtgtaaggaagggatccagtttcagctttctacatatggctagccagttttcccagcaccatttattaaatagggaatcctttcccattgcttgtttttgtcaggtttgtcaaagatcagatagttgcagatatgcggtgttatttctgagggctctgttctgttccattgatctatatctctgttttggtaccagtaccatgctgttttgtttactgtagccttgtagtatagtttgaagtcaggtagtgtgatgcctccagctttgttcttttggcttaggattgacttggcgatgcgggctcttttttggttccatatgaactttaaagtagttttttccaattctgtgaagaaagacattgttagcttgatggggatggcattgaatctgtaaattaccttgggcagtatggccattgtcacaatattgattcttcctacccatgagcatggaatgttcttccatttgtttttatcctcttttatttcattgagcagtggtttgtagttctccttgaagaggtccttcacatcccttgtaaggtggattcctaggtattttattctctttgaagcaattgtgaatgggagttcactcatgatttggctctctgtttgtctattattggtgtataagaatgcttgtgatttttgtacattgattttctatcctgagattttgctgaagttgcttatcagcttaaggagattttgggctgagacaatggggttttctagatatacaatcatgtcatctgcaaacagggacaatttgacttcctcttttcctaattgaatactctttatttccttttcctgcctaattgccctggccagaacttccaacactatgttgaataggggtggtgagagagggcatccttgtcttgtgccagttttcaaagggaatgcttccagtttttgcccattcagtatgatattggctgtgggtttgtcatagatagctcttattattttgagatacgtcccatcaataccgaatttattgagagtttttagcatgaagggttgttgaattttgtcaaaggccttttctgcatctattgagataatcatgtggtttttgtctttggttctgtttatatgctggactacatttattgatttgcatatattgaaccagccttgcatcccagggatgaagcccacttgatcatggtggataagctttttgatgtgctgctggattcgttttgccagtattttattgaggatttttgcatcaatgttcatcaaggatattggtctaaaattctcttttttggttgtgtctctgcccggctttggtatcaggatgatgctggcctcataaaatgagttagggaggattccctctttttctgttgattggaatagtttcagaaggaatggtaccagttcctccttgtacctctggtagaattcagctgtgaatccatctggttctggactcttttcagttggtaatctattgattattgccacaatttcagctcctgttattggtgtattcagagattcaacttcttcctggtttagtcttggcagagtgtatgtgtcgaggaatttatccatttcttctagattttctagtttatttgcatagaggtgcttgtagtattctctgatggtggtttgtatttctgtgggatcggtggtgatatcccctttatcatttttcattgcatctatttgattcttctctctttttttctttattagtcttgctagctgtctatgaattttgttgatcctttcaagaaaccagctcctggattcattaattttttgaagggttttttgtgtctctatttcctttagttctgctctgattttagttatttcttgccttctgctagcttttgaatatgtttgctcttgcttttctagttcttttaattgtgatgttagggtgtcaattttggatctttcctgctttctcttgtgggcatttagtgctataaatttccctctacacactgctttgaatgtgtcccagagattctggtatgttgtgtctttgttctcgttggtttcaaagaaaatctttatttctgccttcatttcgttttgtacccagtagtcattcaggagcaggttgttcagtttccatgtagttgagtggttttgagtgagtttcttaatgctgagttctagtttgattgcactgtggtctgagagatagtttgttataatttctgttcttttacatttgctgaggagagctttactgccaactatgtggtcaattttggaataggtgtggtgtggtgctgaaaaaaatgtatattctgttgatttggggtggagagttctgtagatgtttattaggtccgcttggtgcagagctgagttcagttcctgtgtatccttgttgactttctgtctcgttgatctatctaatgttgacagtggggtgttaaagtctcccattattaaagtgtgggagtctaaatctctttgtaggtcactaaggacttggtttatgaatctgggtgctcctgtattgggtgcatatatatttaggatagctcttcttgttgaattgatccctttaccattatgtattggccttgtctcttttgatctttgttggtttaaagtctgttttatcagagactaggattgcaacccctgcctttttttgttttccatttgcttggtagatcttcctccatccttttattttgagcctatgtgtgtctctgcatgtgagatgggtttcctgaatacaacacactgatgggtcttgactctttatccaatttgccagtctgtgtcttttaattggagcatttagtccatttacttttaaagttaatattgttatgtgtgaatttgatcctgtcattatgatgttagctggttattttgctcattagttgatgcagtttcttcctagtctgaatggtctttacattttggcatgattttgcagtggctggtaccggttgttcctttccatgtttagtgcttccttcaggagctcttctagggcagacctggtggtgacaaaatctctcagcatttgcttgtctgtaaagtattttatttctccttcacttatgaagcttagtttggctggatatgaaattctgggttgaaaattcttttcttaagaatgttgaatattggcccccactctcttctggcttgtagagtttctgccaagagagctgctgttagtttgatgggcttccctttgagggtaacccgacctttctctctggctgcccttaacattttttccttcatttcaactttggagaatctgacaattgtgtgtcttggagttgctcttctcgaggagtatctttgtggcgttctctgtatttcctgaatctgaatgtttgcctgccctgctagattggggaagttctcctggataatatcctgcagagtgttttccaacttggttgcattctccccgtcactttcaggtacaccaatcagatgtagatttggtcttttcacatagtcccatatttcttggaggctttgctcgtttctttttattcttttttctctaaacttctcttcttgcttcatttcattcatttcatcttccatcactgataccctttcttccagttgattgcattggctcctgagacttctgcattcttcacatcgttctcgagccttggctttcagctccatcagctcctttaagcacttctctgtattggttattctagttatacattcatctaaatttttttcaaagtttttaacttctttgcctttggtttgaatttcctcctgtagctcgtagtttgattgtctgaagcctttttctctcaagtcatcaaagtcattctctgtccagctttgttgcattgctggtgaagaactgcattcctttggaggaggagaggtgctctgctttttagagtttccagtttttctgctctgttttttccccatctttgtggttttatctacttttggtctttgatgatggtgatgtacagatgggtttttggtgtggatgtcctttctgtttgttagttttccttctaacagacaggaccctcagctgcaggtctgttggagtttgcttgaggtccatgccaggccctgtttgcctgggtatcagcagcagtgtctgcagaacagtggtttttcgtgaaccgcgaatgctgctgtctgatcgttcctctggaagttttgtctcagaggagtatcaggccgtgtgaggtgtcagtctgccctactggggggtgcctcccagtaaggctgctctggggtcagggatccacttgaggaggcagtctgcccatcctcagatctccagctgcatgctgggagaaccactgctcttttcaaggctgtcagacagggacatttaagtctgcagaggttactgctgttttcttgtttgtctgtgccctgcccccagaggtggagcctacagaggcaggcaggcctccttgagctgtggtgggctccacccagttggagcttcccggctgctttgtttacctaagcaagcctgggcaatggcgggtgcccctcccccagcctggctgccgccttgcagtttgatcgcagactgctgtgctaggaatcagcgagactccgtcggcgtaggaccctctgagccatgtgcaggatataatctcctggtgggcagttttttaagcccgttggaaaagcgcagtattcgggtggcagtgacccgattttccaggtgccatctgtcactcctttctttgactaggaaagggaactccctgaccccttgcgcttcccgagtgaggcaatgcctcgccctgcttcggctggcgcacagtacgctgcacccactgacctgcgcccactgtctggcactccctagtgagatgaacctgatacctcagatggaaatgcagaaatcacccgtcttctgcatcgctcacgctgggagctgtagactggacctgttcctattcagccatcttggctcctcccggttcgatgctttttaatgctttcactgttaatgcttcctggagccctgaaaagaccaggcatctaggatttactcaagaagatatagtcatattctggcaaatgatttgcatatcagaaggactaccatatctgtaaagatccacagagtgtaatgtcccttgagcagagaagcttgaatttgaggaggaggagagaaaggtctgtgctgttatattagttttctgtggtgaccagagcaaattacctcaaaagtgatagcttaaaacaacattttttgttttttaatcttagagtccgtagttcagaaatctgaaatagatctcactgggctaaaatcaagagattggctggaccaccttgctttctcaaggctttagggaaaacccattttcttgccttttccagcttgtagaggccaaccacattcctggatttttagtcaatttctctctctacaaagccagcaacttcaggctgagtccttctgacattgccttttctctggtacacttctgcctcttaggacatttcccttcaaaggacactagtgattatgttgggctcacttgattatgcaggactttcaccttattttaaggtttgctgatcagcaaccttaattccatctgcagccttaactgcccttttccatgtaaaccaacatattcagaagttccagggattaggatgtggacttttcttacaggggtggagacattatttggtctaccacaattatgttccttttaatcattctgaattcccatgaatggggacttatttcattttccattcattaatgtattattagaaatacagtcatgtgtcacttagcaacaggggtatgtcctgagatatgtgttgttagtcaatattgtagttgtgccaacatcatactgtactcacacaagcctagatggtacagcttactacacatttaggctatatgatgtagcctattgctcctaggctacaaacatgtacatgttgctctactgaatactgtaagcaattgtaacacagtgatatttttgtatctaaacatatctaaacatagaaaaggtatagtaaaaaatgctacaacagataaacaatgatacacctgaatagggcatgtaccatgaatagagtttgcaggactgaaagttgctctgagtgaatcagtgagtgagtggtgagtggatgaaaagtcctaggacattactgtttgctattatggactttataaacactggacatttaggctatgctgaatttataaaaaatagttttctttcttcaataataaattaaccttagcttactgtatcttttctactttatatactttaactttttgactgttttgtaatacagctaaatccatgaatgcattgtacagtggtacagaaatatttttttctttacatccttattttacacattttttatttttaaaatttatgtatttgtttttactttttaaacatttttgttaaaaattaagacatggacacacacattagcctagacctacacgggatcaagatcatcagtatattgttttccacttccacacattgttccactggaggatcttttggacaataacatacatgaagctgtcatctcctaggataatgatgccttattcttgaatacctcctgaaggacctacctgagtcttttttacagttaactttttttttctaagtagaagaaatactctctcaaataacaataaaagtaaagtatagtaaataacaagtgataggatttttcactttcattataatctatggaaccactgtcctatatgcagtccgttgttgattgaaaagtcattatgtgaaacatgaccgtattttactattcttttagtgattatctcgtagataacaaattgcatcttgacatcttatcgtctactataaattaccatttttcaattttcccagtaatgctagatagaagctcagaactttaaaaactcaaatgatatctctttctttttgcatgattcctgccacaattatagttcaaagaatgtttaaaccccaatacaacatgagtattattgtttttttcagtcagtgtttgctttcttctacatatttaccttttccgatgcttttaatttcactccatatttctgtgcttgtctctgggttcattttccttttgactaaagaacttatttgatataacgcaggtttgctgctaacaaatactctcagtatttgcttatctgaaaacttctttactttttcattttaaaagaatattttcactgtgtatagaatgggatgttggtggttattttacatatataaatctattatctttcagtgtcttacatttctactgagaagccagctgtttgtactatttttgatcatttaaagatgagacattttcctctgactgacttcagtgtatttctctttgttactggtttctgttaatttaaatatgatatgcttattcagggctttcataaactatgtggaccttcttggatatatggattgatgcgttttaccagtttaggggaattctcaaccattatctcttgaaatagtgcttctgtacctccttttcctctattgtttaagtttccatgaatgttacatttttaaaatatgtcctacatgtatttcacgtctttatattttcaatttttgtgctttatattttcaatttttgtgctttcatttggctatttctattgacttgtttttcttttcttggaagagctttctgttgcctttaatattcttttaaatgcatttattttgatagatttttttttagttctagaatttgcattgaattattttttaatattttccgattctttggtgaatttttccattatttcatcagctttttcccattttcctttactttttgaaaaatactaattggatttactttagttaattcaaagttcttttctgttctgctggtgtgtctttttccctctgtctgggcaaagcccatatcctcatccttttcctcttgcagagaattgacatatgcctccagggaaagaaaatggctctagatgtcagtttacctctccaaggttctccactctccagaatctgagagggcaacctgttgttgcccttgcttcctagcttcctagcttcctaatgcctttgaacacacacagacacacacagtgattttaaaatatgacttttctagttattttcagcaggaatattggtcttccatagactacaacatcctgcttagaagtcagggcatcccttttaaaaaaggttagtaccaccaagaacatacctatagatcaacaagttgggtttattacttttagtgatgaagaatgcacaacatttggaattaggagggtgttacaaaaatattattataggttatgggcttgtttttggtgattttgaggaaggcttaaggatttgatgcttttctatgaattaaatgctttcaggaagtaggggaaattttcctttgataacttcataaatcttgtctacagaaagtgagattaaggctgagttgataataaatctggagtcactctcattaactgagggggagtgcttggtgttttgaggcttggacattgtttatgtttggattataaaatggtcttttttttctggatacattgtgatcacaggctggtcttgtatgttattgacattctgaatggtttatatttaacaaaagaacaccaaactttagctgtgagtgccagaccagtctctagctaatagcaccagaccaccaattggatgtcatgaatgacttctcttgttttaataaatagattgagaacataaggaattagaacagttgctgtgactgctgtattttttccaaattatatccaaggccattgcaggaaaacagcaaaggaagaaaaggaaggaaggaaagaagggagaaagggagggagggagggaggaagggaggaagggaggaagggaaggaaggaaagaattttgacagtgttaagctaggaggtttttcctaatacatgggataaaataagatatcacttagaaagcaattattgggataaaattaaaggatgaggaagggactggagtgagcaaggaagagtaataatcattatagatggatgaagcagcttgctgtaaacagtgaaagctaatttggaactgcagcaaatgaaagatatttgatattgctgtagttcagagagaaaaagagtgatgtaagatgtagcttcagggacggtcagtgaaaaattgaaaaaggtatcataagccctgtgaaaatatgtttttggggagggaagccagaattattgaaatatagactgaaagtgaatattttcaaaatatattctctcaaatcttttgaaatttcaagcatgtgaatgtttaacctttgtcaataacattttattaaaatgtggatacaaaattaatcattattgataggaaaaatggcagagaggaaatatatggtaattaaaaataaattatttgcttatttgaagagaatgaaggatattttgaataacattgaaatttataaagtacagatattaaaagtgtacccatgagaatagaagtacagtttataactccagaataaacaggggaaataataaaaaaaaaaaaactgatggaagacagaaaaggagaaaaatgtgtaaatcaaaatatgtaaagcagataaattgaacacatgtatttattcaggtattaatacaactattaactcatggtgaatagcataatgtgtgagaaatcaaaagcgggtgagaaatcttcaaaaaatgaaaatgggaagcacatggatgtgtgtgacaactgattttgcagagcaaagagatatagagcccaactgattacagaggaagaagtgaacaagaaaccatgcaattctgcgaagtcagaaagtttcatgtatttaaggcagctgaaactcaggaagaggggatgataccatgtggaactcaatgcaaaagacttagtaaaagtcaatgtgtagagattcactcatcaccacacaggcaggtgattattattatatgctttttaattggcatagaatattcatagataaaagtgtccatcttctaagtatatagctcaaaaattatcacaaaatgaatatatcctgtaccctcaatacagatcaagaaatatgccccacagtactgtcagttttggtaggcattctccatgcacttaaaaaatgggtagtacataattgttattttcttgctttttaattattaataagatcagtatttttaatgatgtttttcaaatcttttaaatcattaattttgtggttttgggctagttgtgttatttactagaaaaggtgtagtacaaattttcactgtcattatgcatttgagtacttatttttgtagctctgacagttgtctccttgtactccaaccctctgagtttgctgtaagctcttcttatttactcatctattacttttaaattgatacattccttaagggaaaaaatctcaataaatatcaggctcacttctctaggcttcccttctctttggaatcttgatctttacatcctcattgccttgaatgctctctcaagtcatttaaaactatttctatatcttttctaattgttcttggcaggagaattggcttgaaacaaactcatattcactggataaatgtgaaagtgtttatttagtgtcctaatttttaatttagctccatgcttagctgaatataacgacttataactttgtcttgttgagaacataaaacgtagttccaaaggtataaattttaagttagcatagaatataaaggtagaaaatcccagggagccatcagattctgcttattacacaatttcatagacaccaagagattccaagattcttttcactgtgtgattttctaggattcttcctgaacctgatgttgtctctgagactggacttcaggataaagattggaaaaaatagaattgggaggagcattacatataaagaaatccattctagaatgaagccgaagatattcagtaaattggctataatctgagaaacatctaaggagaagttatctttacagaacttcagtatttccaatggccatacatttactaaatatagcaataatatttaagaaggctgagaattcactatgcaatctcagaaagaaaatggaaatgacttcctaagattctcattttatgttaagccatttaacaatctggtcctaacgtcttttcctgtacctccctagttgtgggacatctttttacagatactctaatgttactcagatgtttcttctcttctcatctcaggaaataatcactgtcttatttatctggccattgatgaaatgattcttcttgtggatttacttgcttggtttccattgataatttggaggcattgtcctctatggagttgtgtcacctatcagcgggctattaatttagggtatggttatagacaactgcagatccccaggtcagaatctctagaaacaggatacatggaaacctggaggcagactcacaccattaactgtgcaagaaattaagacttcttgtaaaagcactctttgtcaattattgacatctttacaatgcagaatgcaagcaaactatttaaaatgtttaaatttatattcagaagctttataggtgtgtcgttatttgtataagaagcattataaggccaatttaaaagttttttctaaacaacattccagaaagtgaaatgtacagcagagatagagaatgtagaaaaaaaaaaaagttctttctaagttctttgagtggaagaaaccttgtatcttttgtcactgctttatctctagggtctagaagtatacctgactcattgagtatgctcaataaattctacttgactgactactaatgagatcaaaggctttatttcttgcttagttgacataatttaggcattaagagctcagactctgaagtcttacccaggtacattccaatgctaggtcttagatgcatagatttgagcaagatgtttactgtatgtaaacatcagtttttcatctgaaaagtaataattacattaatcctatttcttagagttgctataggaagtgatgaaaataataaagttcttagtatatattttatgttaaaaatcttaatttctttccctgaaaatgtaagtataaacgctttacatcattttaaatgcctgcaaaagagcatccaacaaggtagaaaatatgaatgtctacaaagaggatgcttgcctctttaagagtttctgcaacggtgggttcttggtcttggtgaattcaagaatgaagccgaggaccctcaaggtgattgttacagttcttaaagatggtgcgtccagagtttgttccttcagatgttcagatgtgtctagagtttcttccttctggtgggttcctggtcttgctgacttcaggagtaaagccgcagacctttgcattgagtgttacagctcttaaagatggtgcatctgcaggtgttcattcctccctggtggattcgtggtctcgctgacttcaggagtgaagctgcagaccttcgcagtgagtgttatagttcataaaggtagtgcagacccaaagagtgagcagccacaagatttattgtgaagagcaaaagaacaaagcttccacagcgtgcaaggggaccccaggtggttgccgctgctggcttgggcagccagcttttattcccttatttggccccgcccacatcctgtttcttggtccattttacagagcactgattggtccattttacagagtgctgattggtccattttacagagtgctgatcggtgggattttacagagtgctgaatggtgtgtttacaaaccgttagctagacacagagcactagttggtgcgtttttacagagttctgattggtgtatttactaatctttagctagacacacagcgctgattggtgcatttacaaccctttagctagacagaaaagttctccaagtccccacccgattagctagacacagagtgctgattggtgtgtttacaaacctttagctagacacagagaactgattggtgcatttacaatccttagctagacagaaaagttcttcaagttccgccccccgccctccccgccccatcccctccccccgcccccgacccagaagcccagctggcttcacctctcacaacctggatgggagaatcccagaattttgcataataaacaagatttgtagtcttcaagacttccaagttggggccttggtgaggttgggtgaatgccacatcatagcctgtagtggaagcctcctttgaactagctggtatgtttctctcctattgaattcagagagcaataactgaagacaatgtaatacatttcacttcctctcttcctagcacagagggctcaatagatttcccattacaccttctaactcccaggtgccttttcctcattaggagtgctgtgttacaatcttttctgcattcctgctccaggtatgcaaggtaatgaagaaaacctcataccacatgttttaaaaaagcctcacttttgtgtactgttctgtcacacataattcacctctacctgcaccctcacctcagttcatggacagactatagagaacttcctgttagacgccatgttttaaggtgatatcaatcgcataacatgcaatctagggccacctgttattatagagagcaagcaaacaaacaaaaacatttcttcctactatggtttttggctacactctgcgtcttttctctaatagcattcggacaatggcaccatggatctccttggtcttaatgctgtagacaataggattgacaacaggtgggaagaagaggtaggcattggccatcatggcttgcagcagaggggacacacgatgtccaaggcggtgcactatagacaagccaatcataggcacatagtaagcaagcacagcacagacgtgtgagccacatgtgttgagtgccttcttcctcccttctccagtggcaatacccaatacagtgtggagtatgagcccataggagatcacaatcagcaacgaatccagcccaaaagtagaggtaacaatgaaaatcccatagatattgttaacagaaatgttcccacaagatagataagattggggtgcagacaataggaatgtgagagggcattgtggccacagaagggcagacgccataagagaatgggcaacggagccatgagcataatgcttttcagtacgataatagctcctgtgccaaagaccctgggcagtgtcaggatagctgtgtagctcagtgggctgtagatggctataaagcggtccaaagacatggccagcagcacagctggctccatcatggataaagaatggatggagaacatctggaaaaagacaagcttcaagactaatttcagtatttccaaaaaggaatatgcctaacactgtaggcagggtggatgcagagacacgaacctcggccagtgccaacatggcaaggaagaggtacatgggttgatgtagggcaatatctgttctgatgacgtgaagaatgatgccattcccaaggaaaatgatgatgtatatcagggagaaggggacggatatccagaggtgctctgactccagccctgggatgccaaccaaaatgaaagtcgtaggtaaaaaccccaaagagttattagaaattttcatgttgacatatcatcctcagggatcagtgccaccttgaaaattagaaacaaactagtgagatgacatcattatgaagaaagacaactgggcactgagggaagggaagaaaaaagcaaactcacagatttatgtggccaaacttcttatttctaaaaactgacaaatgaccaccatcaagaaatttccagtatggagagtgctacagcttctgtcataggcagatagaaaattatgttctagaaaattatattacattataggcagaaagaaaattatgtgtctgatcaggtgcagtggctcatgcctgtaattccagcactttgggaggctgatgtaggcagatcgcttgagcccaggaatttgagaccagcttaggcaacatggcgaaactctgtctctactaaaaaaaatacaaaaattagccaggcttgttggagtgtgcctgtagtcccagctacttgagaggctgaggtgggaagatcacttgggcccagaaggcaaaggttgcagtgagccaggattgcacgcctacacttatgcctgggtaacagcatgagacaaaagaaaaaggaagagaaaagaaaagaaagaaaaagagaacagcaagcgggagggagggaaggaggaaagaaggaaggaaagaagagaggaaagaataataaaagaaaaggaaagaagagagagagagaaagaaaaggaaggaaggaagagagagaaaaggaaggaaggaaaaagaaaaagcagaagaaaaagagggaaggaaggaatgatagaaaaagaaagaaaagaaagattatgcatttaaggtgtagtgcaccttggatcaacttagagagaaatgactgccttgagttggtgtggagatgtctggccctaaaaagctgctggggagacagagaaatgtaagcaatcccaaaataagatatggaataatatcaggaataggtgaaaatattttattggtaaatatacaaagacaaggtctatagcatggtatataaaaagagctaaaaattacctgaagaatgaatataattgtatgaataattaagcaaggctgagatagtggcagtggccagagcctggagcaagtggcagagaattaaactagaaaagcatagaatttggacccacactgggctagctgtcccatgttttgaaaattctaggagtcaactagaaagattatgtgcaaaggcatggaagattcaggaaggagaaggaacctacgttcgtggatgtgtgtgcagactttaaggttcatgaaaatattctgtcaacgatcacatccacaatctgttgactcaacagttctcaaagaaacttaccttatccattgggactttttctttctagctcagacacactgctgaatacactacggcaacaacagtggaaatctaaacagattttcaaggatgttcttttcctggggaggagaggaaggcaatagagggaaagagaaaaccacctgcctggattgggtgtgttttgagataagcattgtctaggtcagcagttataacattagaatcctagactagcatggtaggaaggacctctgaagattgttttcaactcattcacccaaatgcacacaaacacacacagacacacctgcttacctattcacacacgaacaaacatgcttcccgcatgtgctgaaaatctgattcttgtatgaactttccattcagccactgctgaacttacgcatcaacagggacctcactattccgtaatggttattatgaagttcttctttgctctgcagatctataaccagtgagcacacctctatgtcaaggaccttgcaggaccaaggcaacacagagtcctagacctactcagaaaatctctgcaactttcaaccacagctcacagagaacaaatcttcttccacagatattcaaatacagtcgtcacctatgctgaagtcttatctccaagctggttgcaattatattaagtactacaaaggaaatgttcaagatactttgagagggtcctaaagggaaaaacccaatttattcttaaaagtcaggaaaagctttccttggaaagtggcatttcagctaagacctaagaattagtagaaaatttccaggctaagttgcatgcaatgtagtgcaggaaaaaaaaaagaggggaaattatcatggcagtggcagtgggcatataatatggcactttgacaaaaactaaaataaaatatggagaaaataaaaactgtagatgtaataggatattaaaataatttattttttcatatttttgctatcatgaaaatatggaaagaaaaaaattaattgcctgactaaatagactaaatacaagatccttggacacttaccatgctctgatacaacgtaacatagtagattatcagcttaggaaaagctctgtgctgtgggctatgttaaaatgtagggcagggaaattcaggggcaaattattgaccttaacaaatgatcacacatcagaacatcttatggctgaaaatgagaaacatttctcttctgcattcttatgcccttatgttccttcctcacctccaaaagctcaacatagccttcttagttctttaaatagaccaaatattgatctgcctctggattgagcagctgttcttcccgtgtgctgccttactgaatccttgatcccactgcaccctgtatcttgcctgccacacctcaaataaccggatattggaagaaacaaatcttgactgatacttgaaactagagtctctcctcctctgccttctctgcctgtctgtggtctcttttgttttcttcctttttttttctttcttgcatttttttttttttgcatccttctcagtttccatctccagagtctctaccgccagataagggtcagatctccttgaaagagatcttaaaacacaatcattctcctgagtttaggatttgtttgacaagagcattttagcttgaaaggttacaaaagggatcatgtagtctatagcccagtataataggacacaacaaatcagaaaaaaagtagaatgtgggacagtgatgactgtacccctggagctggacagaattggaggtgaatcttatgttcggtataactttacgtactttacctttgtgcacattagtatctttgtttttaaagataaagatgttaatacttacctcagggactggctctaaatatttaatgtgagcctttagcaaccagtgaatgttaatattctctccactctatatctctttcaggaattctcaggagtcaatcacagtcagcttatttccaactttttattaataattgtctttccttgttattggctcactgatactcagaccacatctgtgaggtaaacaaggagacaagaatttcccacttaatagatgagcatataaaccagacataagcattttgtgagtaacccaagataatatgatggcaaaactatttcaagaattcatgatgtgctctggtgtttttgttttgttttccatctgccaccaatttaggatgtgattcctctccttctgccagacaggttcaagaagctagggaggtgactactgtcttaggaaaaatgctaagggcttcacactgtgacatggggttgggagtcctgaatgctgcttcagaaggcagggcttggggattgtattagttcattctcacactgctctaaagatactacctgagactgggtaatttattaacaaaggaggtttaattgactcacatttccacatagctggggaggcctcaggaaacttacaattatggcagaaggagaagcaggcacatcttacttggtggcaggcaagagagagtgagcaagaagagggaaaactgccttataaaaccatcagatctcatgaaaactcactcagtatcacgagaactgcatgggggaaactgctcccatgatccaataatctcccacctggtccctcccccgacatatagggattatggggattacaattcaatatgaaatttgggtggagacacagagccaagccatatcagggatcatgggcttgtgcactcaccacaagtgaaactggcctctgagcctcaggtgggatggggaagctcacttcagcaagtccctgccactgtggcattcatatcttcttagtcctggggctggaatgctgcccattttttgaaaaagctgatcagagtctctaggagtagagtaatggggagaaagttaggttccctgaggagcaattacccaggtaattacattagcctctctcaatatccagagaacctaagggaaacaagcaaagatatagagtcagtatctttgtgaaatgagtgtaatagtatttatccagcatatttaaataactaatatatgtaaatttcttttttctaacttattttttgttatacttttaagttttagggtacatgtgcacaaggtgcaggttagttacatatgtatacatgtgccatgttggtgtgctgcacccattaactcaccatttaacattaggtatatctcctaatgctatccctgccccctcctcccaccccacaacaggccccggtgtgtgatgttccccttcctgtgtccatgtgttctcattgttcagttcccacctatgagtgagaacatgtggtgtttggctttttgtccttgtgatagtttgctgagaatgatggtttccagcttcatccatgtccctacaaaggacatgaactcatcattttttatggctgcatagtattccatggtgtatatgtgccacattttcttaatccagtctatcattgttggacatttgggttggttccaagtctttgctattgtgaatagtgccgcaataaacatacgtgtgcatgtgtctttatagcagcatgatttataatcctttgggtgtatacccagtaatgggatggctgggtcaaatggtatttctagttctagatccctgaggaatcaccacactgacttccacaatgtttgaactagtttacagtcccaccaacagtgtaaaagtgttcctatttctccacatcctctccagcacctgttgtttcctgactttttaatgattgccattctaactggtgtgagatggtatctcattgtggttttgatttgcatttctctgatggccagtgatgatgagcattttttcatgtgtcttttggctgcataaatgtcttcttttgagaagtgtctgttcatatcctttgcccactttttgatggggttttttttctcttgtaaatttgtttgagttcattgtagattctggatattagccctttgtcagatgagtagattgcaaaaattttctcccattgtgtaggttgcctgttcactctgatggtagtttcttttgctgtgcagaagatctttagtttaattagatcccattagtgaattttggcttttgttgccattgcttttggtgttttagacatgaagtccatgcccatgcctatgtcctgaatggtattgcttaggttttcttctagagtttttatggttttaggtctaacatttaagtctttaatccatcttgagttaatttttgtataaggtgtaaggaagggatccagtttcagcttcctacatttggctagccagttttcccagcaccatttattaaacagggaatcctttccccatttcttgtttttctcaggtttgtcaaagatcagatagttgtagatagacagcattatttctgagggctctgttttgttccattggtctatatctctgttttggtaccagtactatgctgttttggttactgtagccttgtagtatagtttgaaatcaggtagtgtgatgcctccagctttgttcttttggcttaggattgacttggcgatgcgggctcttttttggttccatatgaactttaaagtagttttttccaattctgtgaagaaagtcattggtagcttgatggggatggcattgaatctataaattaccttgggcagtatggccattttcacgatattgtttcttcctatccatgagcatggaatgttcttccatttgtttgtatcttatttccttgagcagtggtttgtagttctccttgaagaggtccttcacatcccttgtaagttggattcctaggtattatattctctctgaagcaattgtgaatgggagttcactcactgtttgtctgttattggtgtataagaatgcttgtgatttttgcacattgattttgtatcctgagactttgctgaagttgcttatcagcttaaggggattttgggctgagacaatggggttttctagatatgcaatcacgtcatctgcaaacagggacaatttgactttctctttacataattgaatgccttttatttccttctcctgcccgattgcccgggccagaacttccaacactatgttgaataggagtggtgagagagggcatccctgtcttgcagcctaggcacattttcattaggcagtgcagtgtggttaagagcagtgtctctgggaccagatctgtattacaatcataacttcaatagctcttcactctatgattgtgcaaagtatctgattaatcttagtttcttcatctgaaaaattgagacaattctacctactccatagattagagagccattcatatgcaattttaaatggagtacagttagaagcaaatactcaatagacacattttattagttgtactttccagcattccagtgagcaatgttgcagtgagctctaagaaaagattgaaaaataatctgacaacaatgaagcgtaaggtatttggagtgggaagccatgagctcttgcacaggtttttggacaatccttccatatggctttggcaaagttactgaatctttctaaaccttagcttttttactatgttgaaagatttccacatgggccctgcctcttttcgagagaaatgattaggtttaatggggctgtggaggaaagcactctgaaatgttagaagcttcatcaattggagcaattgctgagattatgtttccttgcctgccacaaccctgtatcattctctacaaggcatagcccagtaacaagtccagatctgtcttccccatcaaaaacatcacgggagatatgatagaacagcagccctaacaacagattggccatcttcctggaagctgccctattccataaccctgcatatagtcatgctagataagggatattagagaggtcactccaatgacttcctttatccacaaaacaaaggaccttcagcaacttactggtcctttcttctctgtagcttctttctcatgcagcccttccactccatgccagcatcttccatttgactcaggatgctgttctacgtgggctgcactggcacttataaagctgtctctcttccttgggtctttggccctcaaaggaatctccctagatggacgcagacttgatgaatgtcaaagagggattagcatcctcctagaccaaagcatttgagatgcccagttatcttaaatggaaatttagtgaaccatgagtacctctaggaggtatttcagtgagccagaggatccttgactgtcttctctccccagctgccaacttcataagaaaatttattgggtgcttctcaatcctcttttttgtctttcttttcttttcccagacaaaagtccccttgagacagtctttacaaccaggtagttattcactgtcattcactgagcaagtatgtaaagatcacaagctttgggtcagatatttgaatgcaagcattaataagacacaaactctgtctttcagaaagcattgtcttctgcaggaggttgatgtgaaaaaaactaacgtcccctgatgaagcaaaaacaggcttcccaggtgatacaaatatttagcaagctttccttactaatgtctgcactatcattcaaaataggtaacattttagatagaggggaaaacatgtacaaaggctcagagttgtcacaaagcaaaacataaaattctgtgaacttcaattacatgagccatctgtgttttacaaatacagtatcaatttcaaaggcttagagaggcttgtggatattaaataacgggatagttgtaaagatttttgcctgcaggaatataggcttgtgctgaggaatgggccagatgatttaaagcagatactgtcattagcaggaatatgtacagctttggctgattttatgttttttttggtttgttgttgttgttgaatcagtggagcatagttaaaactacaagcaccacagtcagaactgtcaaacttggtataatattgggcaagatattttgtctctgagcctcagtgtacttatctgtaaaatgggtaatctagtagtatccatctcataaggttattgtcaagataaagtgacttatagtgtattatgcccttagaataatacctaggttataatatgtgcttaaaaaaccatgatatgcaaaatagaaggtactcagtaccttctactgagtttttctgtgaatctataactcttaaaatcaagtctattaaaaagtatttaatacaataattttatgttactgttttctgttgctatcttttcctgatactaaatggaaaaatagataacatattctaggaaagggaacaaaaagttagggagaagccaatgatgggacttccttcagtataacatggaaaacatggccctgaaacgagtggtcctgtttggagaggagtccagcataatggtttaagaaaatcagatgcgcttgatattgaatttcagttctgacttacattaatgatttaactaaggaaagttgctttcctctgtgagcctcagtttcctaattttaaaacattgaaaataataatacctccctacttcacaggtttggtgagaaaattaaatgaaataatgtaaaataatgaaaataaaaagtactcagccctctctaccgtgagttaaatgcttaataaacattagcatttatcatgatcataattatcatcttcattgtcatcttcagcataatcgtatataactttttatagtcattgtaaaatgctctttttagattataaaaccgaaatgtcttcttcagaaaatttgtatacggcaaagatagagaaatctatatagaaaataagattatatataacagctgtttttcttttgatacaaatatttatagccttttacatagtgattgttctgtacctaattttgcttatttttatttaatattttgccaacagtttcctaagcatttaaatgtcattttaataatagtgtatcaaatgaatatgctttgatttatgtaatatttttattctagacattttgtatgcttacattcttaaaattatgaacaataacacaaattataatattcacttattaaatagttcaacacatatttattgatcactgacctaggagatggatttagaactgtgagcaaacaggaaaaaaattttgccacaaacagcttacatcctaaatttttaatttatcatttatttaggacagatttttagaagtggcatttctgagacacagagcatgaatattttcaagtcttttgatgtattttgttttttataaaaggcaaattaaattatgttttcattctggtatgtgaaaatacctcttttaccacatacttaacagcacagatatttatttatttttctttttttttgtttttgagaaggagtcttgctctgttgcccaggctggagtgcagtggcacgatctcggctcactgcaagctccacctcctgggttcacgccattctgctgccccagcctcctgagtagctgggactacaggtgcccaccaccatgcccggctaactttttgtatttttagtagagactgggttccaccgtgttagccaggatggtctcgatctcctgacctcgtgatccacccgcctcggcctcccagagtgctgggattacaggcgtgagccaccgcgcccagccagatattgattgttaactctattcttcaatattcgtttagtaacaaattaagatatgttaatttgcattttaaatttgagtaaggtagaagttttcaaatatgttattacctgtacgtatttcctaatttgaaaatgaaatttagatgtcagtggtctatttgttaataagaggcaaaatgggacttcagtgctaatctaaatccaaatcctaaattttttgtaccccattctaccaaatgagatctatagaataggaatttcctctcaacatggagaagaatattctaagtctcggaactgctattgagtaatgtggcctactatgtggatgtaaattaaagtttagaatggaacctatgtttaaggagtgccagcctgtaaggctgcagaaactgctgggttccagaggggctcccaagcctgagagtctgataacacccacacatacaaacatgagataccacacaaacatacacaagaaaccgcacaaacatacatacatatttttagagtttggttcttttttaaatttcgctttgtaattttgtttgttttcctttttatttttgaatcggggtctcacttggtcacccaggcagtagtgtgattatggctcactgcagcctcaacctcctgggctcaagcattcttcccacctcagcctcccaggtagctgagactacagacgtgcaccgccacacatggctaattttaattttttttgtagagatagggtcttgctgtattgttcaggctggtctcaaactcctggactcaagtaatcttcttgcctgaagttggtctcaaactcctggccttcagcaatcctcccaccttggtctcccaaagtgctgggattatagcataagccaccgtgcctggcctcatggtaattttaacctgtaggagaatgggtgggaggatccagagggcctgagtaaagtagaactgggacaatgaagatataccaccttgatggatgccagcagaaaggtgtcttcttgggcttctgaatgtgaagaggaggagttcctcgagacaagaagagaacttctgttagctctggatccctctttatgtatctatatgtccacgcatacatttaatatttattgagtatatggcatgtgctaggcattgtatttatatacatttactggcgagcaagacatgcctaattcctccagggatcttgatttagtcattctaatggacacatgcacacaccttcataaacaggacattactgtgtgacaaatgttacaacgggaaatgcagggcactgtggaaggaaaccgatggagcatttggtgctttaccattggaaagggaggagctatctgtgaaaatgtccttgaggaagcaatttcaaagctgagacccctgcaaggattgcatttagtcactcgtagggacaggctgatcagccaatgtaaagtttatttcctcctgagcaatgggattgtgacttcaatatgtttgtgtgagtttccttggctgaagctttctcacgttacatgtcattgttcaatatcacacaactaaaacacctacaagtaaatactgactgtagcttaatgtcagacttgaggttgtaaggtaaaatcagagatgagaggagtcaaggataggatcaaagtctcttcttctagaggaatatggtcaggagagagcacaaccttagaaatttgggggggtgttgcttgaaacaggtgttgaggaagaatgcaggagttctgaggtttctgatgtgacttgggggtctgaaagttactgctgaccaggatagaaaaagatgagaagaaacttggccaggtagataagatggaagcagtcccaaggaaccatggaaggaggtgtatttccggaggtgagttagagcaaatggcatttacctggtctctgccaggctctcctctgggtgctctggtatttattgttctttttagtttttatttagtttcattttagttttagttacattgatgatgaccttcaataaagttgccttctggatagctttgatgctaccaaaaatgccagttctcagctgtaggaggagccattaaaatctaagcaagagaagttcagttttttaaagccacaactccagacataaatttgcccatattttatttaggacaggggcaaaaaatctttaagagcatgctatatactcaatactccaaattttcagtccaatttggggccttcttataggcctctagggggagttttagccccaggactcatttactggcctttttaagacctaggaacttgataatggcacggtggatctccttggtcttaatgctgtatatgattgggttaagcatgggaggcacaaaaaggtagacattggccataagaagatgaatagcaggtggggcatgcttcccaaaacggtgcaccagggacagccccatcatgggcacaaagaatactagcacagcacagagaggagcggtgcatgtctgaaaggcacggcgctgctcctcttgggaggccaggcctgctactgtgtgcaggatgagtccataggacagtgcgatgagcaccaggtccagcatcacagtgaaaactaccaccatcagtccatacagattattgaaggtgatatctgtgcaggccagctgtatcacttcctggtgcaggcaaaatgagtgggagaggaccacagatccacagtagggaaaagccttcaggaggaggacaatagggatagtggccacaggtccccggaagatgacaattaggcctgctctgaccacttgctggccagtgataatgaccgaatacctcagagggtggcagatggccacaaggcggtcaaaggacatcatgaggagcactgaggactccatgaaggaaaaagagtggatgcagaacatctggatttgacacgctccaaagtagatactatgggagttaaaccagaagatccccatagtggtgggcaacgtggacacacacagccccaggtcagtgagggccagcaaggatagtagatagtacatgggtgtgtgcagacgagggttggtcttaataatgatcagaatgaaacaattgcctgagatggcaaccatgtacataaagaaaaaggggatgaaaatccagtgtttgatgccttccaatccaggaaagctggtgagatagaatatggggctaaactgagtaatgttggatagcagcatgaattgaggactgagcgaatattggactgacattcctcggggattgagctgaaaataaatggatatttctggttattaattcttcagcttcactaacattcacaacatcacaagcagtaccatggtcatcatcacctttagtattatctactccacccttatgaattctgccaatctcactactttattgaactttctttgataacctcgccctcaccagttttcctctgtatttcaattatttcagttcctctctgcctctttgctggtgtgcctttattgctcaacccttaagtatagttcttcccatccttggcaatttcctggccatattctattatttcttcttaatgtcatccactaccatgatttcatttaccatccatatattgataaataacaaatatataattccagaacttgtctttctctcttttgatttccagactctagcaacatctgtacttttcattatctcagtggctcaagtcaaatgtcatgttttatgttagacttctccatatcacatctctccatagtatctaatcaaccaatcaccaagtcctagggtttctgtttactgaatacctcaagtctgtttactcaccgtcaccttcattgatgctattctaattcagatcactctttcaggactattccagtgactcatcttttgtactactgtattcagttgactactatatagcaagagagacgtatacataaacaagtttttaatgaagtaaaaaaggtttaaaatgacattcaagaccctaccttattttctctccgtgtatatcctattttcttatctatcctaatttcctctgtatattcacggtgttaatgacactaaacaattcttccagtttatctagtatgcttgctcataggtaaacatttgtattttcattcttcctggaataaaaacattttttcctgaaatagctttcccttaatctttgtctagttaacttctactaatataacccaccttagcttagatatgatgtccttcagaaggccttcttaaattccccaagtttagtttgaataccctctcctatgtgttcctgtagttcactatgcactaattaccatgatattttccctgcagcattgtcaatttctgtattgcttctataatgtgaattccttgtggacataaaccatgactgtctcttttttaattttaatattagctctagggattgacttttttagccaccatatcattggaatcctttaaatattatttgaataaattattaaatatgtatcattaccattaatcttatttcaataattatttcaatattcaattatttcaataattattcattaattgattcaataaatacatattgaaattgtattacatggcagacataattctattaggttggtgcaaaagtaattgtggtttttaccattactttcaatggcaagaactgcaattacttttacacctaggtactgaaaatacaatgaacagaaacagaacagagacaaaaataaacacatacatacatactgcaatgcaaggtaatgtaatgcaataaagaagtagggagcaaaggaggaaggtaagagtgatgcattttatatagggtagtcagagaagacctctctgagtaggtaattttagagaagaaatcaaaatcagagggcaagtgtgtggctatcttagggaaaaacattcaaggaaggaggaagaacaagtgaaagttcctgaagcagagagcagcttgacaagtttaaaagacaaaagaaggccaatgtatattcaatggaggaagcaaggtggggaatggtggcaaatccacttgaagtagcagctaaatgctacgtcatgtatgatcttgcaggtcacgcaagctactttgaattttattatacttgtgagcttcgagttgagagcagaggtgctgcatggatataaggcttacatcactttggcaaggggtaaaaaatagtccacatttatcttttccatttctttacttctcagtttactactcaaccaaccaccctataatgttttttttaaaacccacttagctaaagcaatgctccttaaattcaccagtgacttctaggggccaaatgcaatggagagtcttaatcatacctgcttttattgatttttttgtgcaatagttgtgtgctctggccatgccttcctttttagagctctctctagaaattcttaatgccaagatctgctggttctcttctgatttttgtgatagcttctatgcactctcttatttccattgctcaaatatttatgttattcagtttactgtccttgaacaccttaacttctcattcattatattatctattattattattacttatacagtggtggctcttagacattaatctctagtccagataactccgttacatatcaggcctgagtttctgccttctcactaggtgtttccaaaaggatactgatgaaactcaacacgtctaatattgagcccagcatccatcttttcacacctgattcttctcatatttatgcattttttataatattattcaccatttcctgccattcaagacaacatttttgagctgatgctctactcaaccctctccctctttctgtatctaatttttaactaagttcttttaatctatccctgtaatctattcatcttcatctctgtagccaatgtccttgttcttagcttttccacacctgcttgcctgacctgtcattcaacatgcaaagccaggctcctccttcccttggtccatcctctactgcagccaccgagattatgcagaaagtactaactctatgaatcactgcactgttttcagtacttcagtagctcctatcattagaataaagttcaaacttgtaaaagatctgtggtgatagtccaatttattgaggccatacatgatttagatgctgtgaaaagcttgacataatcatgaatatttcatgtaactatgaaacattttattactacttcacaaggagaaaactacaaaaaggtaaacaatcatcccaaggcctggtagtgagcgaaaatcaggataagatatgaacctttgtctctctatgcatggccctggtagcctcaaacaccctgtaacaccatctttagcccggtccttcttgttttggcacctttccaaacccatcttttcccagtcaacacacccatatcatttttttcttcaattccctacacatacttttcttgtttttattcttctatatttattgctttcttggcaaaaaccacccctgtttttccaaccagtaaacacttgcggatcctttaagacttagtacaaatatcacttcttctgtcaaatctctcctgacttccttctgtagcattaggtacatctttctctgttctcacgtagtacctgtaatgtactattaaggtgtaaatacacacacacattctttatatttttatatttatatatacttattgatatatatatagaacatacttatacatccatataagtacacatatgtataagtttaaataacatataagtgtatagatttactcataaatactttatagaatatacattttagtatatacattatatattctttatatactttatagattttttatatataagtatagggtatacatatatgtgtctgtatatttatatatgtaaacaaatatacaaaaatattagatatttgtacacatatatatactttgtacaacatatatattataggtagtatttatacgtattctttattatacatgtttagaacataaatttatattggcaaaaactgccattaatttttcaccaacctaataattcattttttaagttgattagactggaattctctaaaggcccctggagcctgacagtgtctaagatgtggtaggtaccactatatatatatttttttgcatgaaaaactaaatgggtgaataaataaagtactcacctcttatcctgattctttgtgcctggggttctgttgtcagctctgtgttcaccaacttcagagtgatgagatggacagggagaaggatctggtagaaacaagatgtctatacagagacaatgacagggctgggattatttctcttggaaagtatacttcctcttgggaagaaagctttaggggatttctcctagcaagagagataattatccatgataggagagcaacagtcattttttcatgtctactaagcaatggaggagtccactcagagcagtcagttacatctaattacaacataattaaaatattcaaggcagagtagattcatcttagatcacaggagaaaattcctgaaaagagattttcagtatacaatgagtaattggctctctacctcacctgtgtctaaatattcttttgtttgaatttaatattagttattttttaatgaactacattggtggaggatactgtttcttgtaaataggagaatatgcaaaagacgctgcacctaaacacaaggacttgaaccagattattcatttttgaacccctagagaacatttccacagtggtcaaactcatctgtaaacatgcctgtttttagtaggatagaggaggattttggaaggcgaaggccatatcctggatactggggaagttacaaggtgttgtttggattaaaataagcagattgaggatggggtcttttctatgttaactggaccagcatataaaatgcatttaataatttgttgaataagtgaatgactgtttttctgatgagagtaaggagagggtgtgtataccagatggctcggcaggaaagagtatagagaccagagggcttctgccatcctgacttctagacatgatccagggaggggctggcctggccatgcaggcactcatcaggggagtgaggcagccctgcctcctggccttcctaacagaatactgcagatgagctcgcctcttttccagcaagagaaggtcctgttttctgttctttctctggctctggttctgtgcatagactctgagaatatcagaagagattctgtgagaaccctggtttctaagacttcattttccaagtgaaaaatctaaggcccagactgctgtatatggtggttcacacttataatcctggcaacttggaagaataaggtgggaggattgcttgaatccggtttgagtttacagtgagctatgattacaccactgcactgtagcctgggtaacagagctagacctcatttctaaaaacaacaaacaaagaaacaacaacaaaagaaaacaaagaaaaaaaaatcccattaggcttagtgcagggaatgtggggaatccatttggctaaggacattcaaacatttgggggaaaagccttaattgtaactgagaccatgtctttttgggctcactgcttttgtgatacctatgcattcccattttccctcattttctccctcctctctcccatgtccccctaattacccactcctgaaaccccggcacaagacagtagtgagactcaccagcaggtaataacaaaaatgtgaagccaatgagtaggttccaaaggaagaaagaagagtatagataaggatgacacaagggtcactgagaggcacaaggctgtggctgtcacagaaggatttatcctcctaaagaccatggctccagctgggagaacttaatggtaaacaaagggtccccagggctgggaatcctatgggcaggaaactttctttatctccacccctgtctcctgaagctgaagagccctaactttttagcattcagtccccaggttttggctacacagacatctgctgcaacaaaagtactactgccttatctgtttatttttaatttcataaagaagtcaattcatatcacttatcattttatttactgtcttctgttatccactagtaatggacccgtcgttttccagagaggtcggatgtagtatatgaagaggattatccatgtgatgttcacagtggcttttaaattgcacatctgccttgaagcaccacaatcaccactacttcaagattctctcactcctgcactcattttcctgtctatttttatatttccatttactgcagataattaaattgccctccatctctgccagcctctatatctttggacctagaagtcaatcttgcatattcaatcctaccccaaacaaatgtccaggtcagtgtctcaggctttcccaaagctctctacttcatctttgaatgcactggactttccttcaatgagccctacaacaagtagcctttacaaaacttttttccttcttttctggtagcaaatgccatcaacatttagaaaaaaaaaaatagtcttgtacttcttccccagactatgctacagaacctgagttaatgtgatcaggtcatgtgtacatttctcttttctttcaaaactcacacacaacctctccaccacaaacacacacacactcttggagactggcatgaagcaaggtattacatcctttaaatagggcatggttgattagagttgtgtggggatgagctccaaaacggggcatacagatctaaaaccaggacagagacccatgaagtttatgacatgccattgtgatcagaccacacccagacagaagtggcaccaccttacaccgggtaagtaactggttgttagggccagagtgtaggagagtcagggtgataggacaagatgcagagagcaggatgtcttattaaattgtagttatgaggaaggttctggcttcggtacaataggaaggagctgagcatcttcatttaggcttgtaggagagggcaccactaccagaaaaatttcagaaaatcctgcatttattaagaacatgattttagcctatttcactgggatcctagccaaggacagtataacagcaacaatgctgctattattaccagcaacagcaaatattgctattattcaggggcatctatcacacataagataggaaaacaactatcttagcgcaatgtaagagatggacatggcaattatattaatatttgtgggtagcacctggcccacaggtgagggccagggaaggccccaacctgagctatgaagactaattaagaatcaaccacagatagggctttatagaaaggtatttccaaaaaggaggggtagtgtaagcaagggcatggaggtgaggaaaagttgtttatgtgttttgagaactataagattttccggtgatcaaatataacatttaagagagttaataccttggaataaaacagtagaggtaggcaggggcaagaccctgaatgagtttatatgacatgtcaaacatggtacacattttgatggttgggtttaaaaaggcaggagataacaatcatattttccagagtacattgttaacaatatgcaggaaggatttaaagtctgcactggaaacagatgttattttggtgtatggagctggatgcagatatgtaattgacagctttttacgtagataaacaatactgtttagtggataacctaccatttagagatctctaatatttgcttacttttttaaactaacatctgtataatagctttatattctatttctctgaattatataattgaaggaccagtttccaagcaatagatttatttgaaaaccaaatgaaagaactcagcatttttgattctttattgctctaaatgacctttagatttgttttatcatatcacaaaatagtcctctttgaagtgtgactgaaattacattaaacattctcatcaattttcattgacgtgcattaagtgcgtcctgtgagaaactctgatcaagaacttgaagatagacagattaacatgtcatggtcttgcctttatgaagctcacattgagtaaagatgttagattgttcaacgaagtttccaaaatagggtcactagcccaggctaggaaggcagaggtagtttctgaagcctggaggccaagaggaggatgatggggacaatgaaggagcaagtcctcggacctatctctatcactgtgggtaatcatgcgaatattaggtgaagtgaatgtgggtgcatgatggttggggaaggtgaagtatcaacacattagtgtgaggcattcaggccttaacctttaaggtattagaattcattattaaagaatctaaatccattactaaaagtgaaaagtgtcactgtaacagtgtacctatttgttaatgtgcaaatggttttcattgcatgtaatattgtttgtgtgtgtgtgagagagagagagagaaacagcgagcgagcgacagagagagagaggtggggtgggggtatggtggggtggaaagcctggctttcaaggggccagtataagttttatttaaggaacctctatccagaattgatacctagccagcccactgagccaggcttggtgaagtaggagattccttcaggagaactgaatccccaaggtctgtacacatgctgtggttttccaatgtagccaccagggggagcattcagcccaaggataggcttaaattctgaccagcaccaaggccctactatccccagggcacaagaaaatgtggcttttcttccagcaccaccttcccgtgtcctcaatacccactacacagctgaaagctgccaaccagttcattcttcctttgaggatgatcttcctctctctcatgcacaaaatagacatatctacatcttacaaacacataaaaactaaaattgatggagagagataggttttcttagctttttcagatttttacagatggtaatctcacacaaatctatgtgtgtggcctttagtcttaatcatattgaccaagccttaaatccccactctgaccagaaacagacctaaataaaatccttactcacagggttctcaatgtctccagactcacaacagactctttttaggtgtctctgtcacagaaaatggccacaaggtcacctcactctcaggcctgttagaacaagtccttcccagaagaactccattttgtggtgtgagatcgatgcgggtctttcagactggagagacccacagaagttaggattgccaaaagggtcttctggactggtccacagcccctaagaaattttcatgttgcaattcattttgtccatccccctgcctccctggacacctgcatctgtgtgtgcacagagagtctggaaggtttacagagaagtctccacatcttcccacagcaactctttcagaaacgccttctttcgtaacatcctacctctcttcagtcattatgaaagggaaccgattttcattttcattgtgaaaacttttcagagagaccccttttgggaaaccatctcttctccccactccaagttgggctaaagttttagtgtattttgcatattttgatttgctataacagagtacctgagtctgggtagcttattttttttttttaaagttttgtttggttcatgattctggtgacttaaaagtccaagatcgggcggttgcatctgataaaggtctcatgctggttccaaacatggcagaaagcagacaaagagcaagtgcatgcaaggagatcacatgatgagagaggacgccagggagagaaacccagaaagccagactcatgggaaagtatcaagctgtccaccatatgtgaaattagaattctaaaaggaaacaaaaaatggattaaacgttttttgaggaattattgactgaatgtttcaacatctggacataaaatctattaattcatatctttagctaaccttgagcaatgtcaattaaaaaataaaacacaactaaatgcatatcttacaaatggcataaacaacaaatgtatgccaatcttaaaagcagacatagaaaaagacacattgcatacaagaaaattattagaggaaacaacggaaacctgaaaaaataaactggaactttattttttatttttttatttattttatttattattattattatactttaagatttagggtacatgtgcataatgtgccggttagttacatatgtatacatgtgccatgttggtgtgctgcacccattaactcgtaatttagcattaggtatatctcctaatgccatccctccctgcacccccaccccacaacagtccccagagtgtgatgttccccttcctgtgtccatgtgttctcattgttcagttcccatctatgagtgagaatatgtggtgtttggttttttgtccttgcgatagtttactgagaatgatgatttccaatttcatccatgtccctacaaaggacatgaactcatcatttttatggctgcatagtattccatggtgtatatgtgccacattttcttaatccagtctatcattgttggacatttgggttggttccaagtctttgctattgtgaatagtaccgcaataaacatacgtgtgcatgtgtctttatagcagcatgatttatattcctttgggtatatacccagtaatgggatggctgggtcaaatggtatttctagttctagatccctgaggaatcgccacactgacttccacaatggttgaactagtttacagtcccaccaagagtgtaaaagtgttcctatttctccacatcctctccagcacctgttgtttcctgactttttaatgattgccattctaactggtatgagatggtatctcattgtggttttgatttgcatttctctgatggccagtgatgatgagcattttttcatgtgtcttttggttgcataaatgttttcttttgagaagtgtctgttcatatcctttgcccacttgttgatggggctgtttgtttttttcttgtaaatttgtttgagttcattatagattctggatattagccctttgtcagatgagtaggttgtgaaaattttctcccattgtgtaggttgcctgttcactctgatggtagtttctttagctgtgcagaagctctttagtttcattagatcccattagtgaattttggcttttgttgccatcgcttttggtgttttagacatgaagtccttgcccatgcctatgtcctgaatggtaatgcctgcgttttcttctagggtttttatggttttaggtctaatgtttaagtctttaatccatcttgaattaatttttgtataaggtgtaaggaagggatccagtttcagcattctacatatggctagccagttctcccagcaccatttattaaatagggaatcctttccccatttcttgtttttctcaggtttttcaaagatcagatagttgtagatatgcgtcgttatttctgagggctctgttctgttccattgatctatatctgtgttttggtaccagtaacatgctgttttggttactgtagccttgtagtatagtttgaagtgaggtagcctgatgcctccagctttgttcttttggcttaggattgacttggcaatgcaggctcttttttggttccatatgaactttaaagtcgtttttccaattctgtgaagaaaatcattggtagcttgatggggatggcattgaatctataaattaccttgggcattatggccattttgatgatattgattcttcctacccataagcatggaatgttcttccatttgtttgtatcttcttttatttcattgagcagtggtttgtagttctccttgaagaggtccttcacatcccttgtaagttggattcctaggtattttattctctttgaagcaattgtgaatgggagttccctcatgatttggctctctgtttgtctgttattggtgtataagaatgcttgtgatttttgcacattggttttgtatcctgaggctttgctgaagttgcttatcagcttaaggagattttgggctgagacaagggggttttctagatatacaatcatgtcgtctgcaaacagggacaatttgacttcctcttttcttaattgaatacccttttttcctgtcttctgcctaattgccctggccagaacttccaacactatgttgaataggagtagtgagagagggcatccctgtcttgtgccagtttacaaagggaatgcttccagtttttgcccattcagtatgatattggctgtgggtttgtcatagatagctcttattattttgagatatgtcccatcaatacctaatttattgaaagtttttagcatgaagggttgttgaattttgtcaaaggccttttctgcatctattgagataatcatgtggtttttgtctttggttctgtttatatgctggattacatttattgatttgcatatattgaaccagccttgcatcccagggatgaagtccacttgatcatcgtggataagctttttgatgtgctgctggattcggtttgccagtattttattgaggatttttgcatcgatgttcatcagggatattcatctaaaattctcttttttggttgtgtctctttctggctttggtattaggatgatgctggcctcataaaatgagttagggaggattccttctttttctgttgattggaatagtttcagaaggaatggtaccaattcctccttgtacctctgttagaatttggctgtgaatccatctggtcctggactctttttggttggtaagctattgattattgccacaatttcagatcctgttattggtctattcagagattcaacttcttcctggtttagtcttgggatagtgtatgtgtccaggaatttatccatttcttctagattttctagtttatttgcgtagaggtgtttgtagtattctctgatggcagtttgtatttctgtgggatcggtggtgatatcccctttatcatttttttattgtgtctatttgattcttctctcttttcttattagtcttgctagcggtctatcagttttgttgatcctttcaaaaaaccagctcccagattcattaattttttgaagggttttttgtgtctctgtttccttcagttctgctctgattttagttatttcttgacttctgctagcttttgaatgtgtttgctcttgcttatctagttcttttaattgtgatgttagggtgtcaattttggatctttcttgctttctcttgtgggcgtttagtgctataaatttccccctacacactgattcgaatgtgtcccagagattctggtatgttgtgtctttgttctcattggtttcaaagaacatctttatttctgccttcatttcgttatgtacccagtagtcattcaggagcaggttgttcagtttccatgtagttgagtggttttgagtgagtttcttaatcctgagttctagtttgattgcactgtggtctgagagacagtttgttataatttctgttcttttatatttgctgaggagagctttacttccaagtatgtggtcaattttggaataggtgttgtgtggtgctgaaaaaaaatgtatattctgttgatttggggtggagagttctgtagatgtctattaggtctgcttggtgcagagctgtgttcaattcctggatatccttgttaactttctgtctcgttgatctgtctaatgttgacagtggggtattaaagtctcccattattaaagtgtgggagtctaagtctctttgtaggtctctaaggacttgctttatgaatctgggtgctcctgtattgggtgcatatatatttaggatagttagctcttcttgttgaattgatccctttaccattatgtaatggccttctttgtctcttttgatctttgttggtttaaagcctgttttatcagagactaggattgcaacccctgcctttttttgttttccatttgcttggtagatcttcctccatccttttattttgagcctatgtgtgtgtgtgcacatgagatgggtttcctgaatacactctttatccaatttgccagtctgtgtctttcaattggagcacttagtccatttacatttaaagttaatattgtatgtgtgaatttgatcctgtcattatgatagctggttattttgctcgttagttgatgcagtttcttcctagtcttgatggtcttcacattttggcctgattttgcagtggctggtaccggttgtgcctttccatgtttagtgcttccttcaggagctcttttaggtcaggcctggtgatgacaaaatctctcagcatttgcttgtctgtaaagtattttatttctccttcacttatgaagcttagtttggctggatattaaattctgtgttgaaaattctttcctttaaggatgttgaatattggcccccactctcttctggcttgtagagtttctgccaagagagctgctgttagtctgatgggcttccctttgtgggtaacccgacctttctctctggctgcccttaacattttttccttcatttcaactttggtgaatctgacaattatgtgtcttggagttgctcttctcgaggagtatgtttgtggcgttctctgtatttcctgaatctgaatgttggcctgccttgctagattggggaagttctcctggataatatcctgcagagtgttttccaacttggttcgattctccccgtcactttcaggtacaccaatcagacctagatttgatcttttcacatagtcccatatttcttggaggctttgttcatttctttttattcttttttctctaaacttcccttctcgcttcatttcatttatttcatcttccatcactgataccctttcttccagttgatcgcatcagctcctgaggcttctccattcttcacgtcattctcgagccttggctttcagctccatcagctcctttaagcacttctctgtattggttattctagttatacattcatctaaattttttttcaaagtttttatcttctttgcctttggtttgaatttcctcctgtagctcggagtagtttcatcgtctgaagtcttcttctctcagctcgtcaaagtcattctccatccagctttgttccgttgctggtgaggaactgctttcctttggaggaggaaaggtgctctgctttttagagtttccagtttttctgctctgttttttccccaactttgtggttgtatctacttttggtctttgatgatagtgatgtaccgatgggtttttggtgtggatgtcctttctgtttgttagttttccttctaacagacaggaccctcagctgcaggtctgttggagtttgctagaggtccactccagaccctgtttgcctgggtatcagcagcggtgtctgcagaaccgcagattttcgtgatccgcgaatgctgctgtctgatcgttcctctggaagttttgtctcagaggagtacctggccgtgtgaggtgtcagtctgcccttacttgggggtgcctcccagttaggctgctcgggggtcaggggtcagggacccacttgaggaggcagtctgcccgttctcagatctccagctgtgtgctgggagaaccactgctctcctcaaagctgtcagacagggacatttaagtctgcagaggttactgctgtctttttgtttgtctgtgccctgcccccaaaggtggagcctacagaggcaggcaggcctccttgagctgtggtggggtccacccagtttgagcttcctggctgctttgtttacctaagcaagcctgggcaatggcggctgcccctcccccagcctcgctgccaccttgcagtttgatctcagactgctgtgctagcaatcagggagactccgtgggcgtaggaccctcggagccatgtgcaggatataatctcctggtgcgccatttcctaagcctgtcagaaaagcacagtattcgggtgggagtggcccaattttccaggtgccgtatgtcacccctttccttgaccaggaaagggaactccatgaccccttgtgcttcccaagtgaggcaatgcctcaccctgcttcggctggtgcatggtgtgctgcacccactgacctgtgcccactgtctggcactccctagcgagatgaaccccatacctcagatggaaatgcagaaatcacccgtcttctgtgttgttcacgctgggagctgtagaccagagctgttcctatttggccatcttggctcaaaaactggaactttatttgtgaaagaaaaaatcgatcaatatagacttccagtgaaaattttcttcaaatcaagacaatatctaaaaaattgccgagactgatatcaagcagctatctctatacatgttcttccaggagttttgtgatttcaggtcttacatttatgtctttaatctattttgagttgacttatggcttaaggtaaaggtccaattttattcttttgcatttggatatccagttttcccaacactatttgttgaggagactatccttcccctattgtgttggtggccttgttgagaattactggactgtatatacgtaaatttatttctgggctctttattctgttcaatttggtctatgtgtctatttatgtgatagtaccatacttttttggttactatagctttgtaatataatttgaaatcagaacgtgtgctgccatcaagttggtttttctttctcaagattgttttggccatttgggggtgttctgtggtttcatacaaattttcaaattgttttctgtaaaatgtgccagagctcaggtaacaaaagcaaaaataaacaagtggagcaacatcaaactaaatattttctgcacagcaaagaaaacaatcatcaaaaggaacagtttgggagaaaatatttacagatcatatatctgatacaagtctaatacccaaaatatataaggaactcaatcaactaaatatgaaaaaatataatagtaacctaagtaaaaatgggcaaaggatctgaatatacatttctctgaagacatgcaaatggtcagcaggcatatgaaaaggtgcactacatcaccaatcatcaggaaaatgcaaatcaaaaccacaagtatcactcacacctgttgagatggctattatcaaaaaagacaagagataggggttggagaggctgtggagaaaggagaactcttgtgcatagctggtgggaatgtaagttaacatagccattatagaaaacgtatggaagtttctcaaacaactaaaaatagagttattgtatgatgaagaaatttctctgctgtatatgtatccaaaataaataaaatccgcattttctagagctatctgcactctcatgttaattgcagcattattcacaatagccaagacatggaaacaatctaagtggtatctatatatagatgaacagataaagacattgtgacaggtctgtatatgatattgtgatatatgtcatatgtatgtatgatatcacaatattattcagccttaaaaaaggagatggggggaatgtataaacctagagtacattttgctaagtgaaataaaccagacacagaaacaaataaaggcatgatattacttatatgtggaatctcaaaagaaaaataaggtcaaatgcatagaaacagtgtaaaaaggggaagaaagaaagagaaaatagggagaagtaggtcaaaggttataaacttgcagctgtataggataaataagtttagagatctagtgtatggcatgaagacttaatactgtactgtaaactaaacatttgttatgacagtagatgttagatgcccttacacaaagaaaaagcaaaaggtatctatggaaggtgttgtattgatggataggttaatttgcttgattgaagtaatcatctcactatgtacacatatatcctatattttttgaacaagcttacttgtttcagataaaatattttaaaagcttttatctgaagcaagtcaaatttctgtttcctaattgtttagggtccttcatgttatttccactcttaaaacttatgtaaccctttggatataatgagatatatgtttttctctatttttaatatcagtactctttagatacagctatcactgtctctcagggtacctctgcctctggtcattttgttcattctttatgttgaaattttatatctccggcctacaactcagggttttacagtttcatcaatgtctctattaaatgtttatgagccacagagaatgagaattatatgttcaatttttttgaacttctgtgtttgagttttaaaaaaattaacctaatgtgaaagaccctagatccggggaaaggtgctgtgtggcttagagtataaacatcagaatgtgctatggactttctagaatatttcagtgcccttgtatatcctcagaatgtgtggagagtaattccaaaacaaagcccttacttcaatatccatggtggtccatagctagggctagcagaaggaagggttcaaaatcactatttttatcactcaaattatctgctcttggaaaaaccagtccctttgggtagccccaatcatgtgtaagtctttttcctgaagtatgatcatatggttctcttccttctgtctgctcattgaaccagagctccaggaccaataccactatggcaatacttcttttgcctctacaactctcaggtcacagctgaaatattacctcctctcagaacccgcatttgtcacactagcttacataaattttgttattctctattgcatcaaattttttctttctttcatagcagctatatgaggttgtaattatttttgtcacttttttattatttcctttccgttaaaatacaagcttcataggaacagagaatatatgcaccaatgtatttttgtacccagtagttgctaaaatagagaagcctctcattagataaacaaacaactaaacaatgaccgcttgttaaataaatgtatttagttattctattattcatttctaaacacagaaagagtgagaaagggagaaagacagaaagtaagaatgaaagaaagagagtgagataaagaatagatattttctggcattaaattattgccctcaaattggacagagacataccaacaaatgatcctctgaagatttgaatttaattttccctgtaaattgctctgacctgacaacccagctattttagtttagtctttgcagatgatatacataaaatgcctatctcactttgctgtagcatttccaatcctggacagtcagcataaaagatactatcgtcacttatttaatatttcatagcattaaacattcaaaccttcaactttaggatttactataaaagactgtgactgttaatgataataataaatacattgatgattatgagcattatttttaaattacaacttggtagcctctagcatttatatacctgtattttctatatgcatttctatagaagcagcttgcacatgctgtacaaaccataagatggcaggagaggtttgtggaacactgactctcctggggccatgcagagggaggtttgaagatcttgttgatacagattgacacagaataccaaagcctctttccccactgcctttccttgagtaaaaatcctgagaaaatgtcttccctttctttctatgttgatagcaaaaccaatgaggtcatcacttttaacaactgttgacttattttggattttagtctacattcactgtaacacaaaaatgcagacaagcagcactgattttagtgtggcatcatggaaataacagtgctacacatagcccttgctaccagccaataggactatttatttgagtatgttcatatatgtatatataaatgtgtagaaaagttgcagagaaatgtatggcagattataaagggaaattatctccagggaggatagaaaggtaaggataaaaggtctttactttatatttaatatacatggagtatatataattttttaaattatatcatagacatatttaggatagtgaatggaaaattttaaaaatacaactacttactagttgtatacttttttaaatgtctcaaattatcagattttattttttatccagaaaaaatatataaaaagtctgtttcatagagttttactgaggtataatagatgtaattctcctaaaagtgttatattttgcaaatagtggctgctaaaatattattgttaatagtattccactaactagtaataataactttaattaatatttgttaagccgtgactttgtttctactaccccacacacatgggcatacatatcttcttctatcatgttggcctcattcagtacagtactagaaaatcagtagggactcaggttatatgtgtgaatggatgaataaatgaatgaatgcctatttttaaagacttcatcctttctgtatgtctaaccttagattctagtcatggccatatgtctctaggtggcccaaccaccctatcacagattctgcttcaaaggcactcatcttggtgaatgaatatctagtcccagaaggaggctaaaaactatcttgtccacatctagttggctgacacacaatttaggcttcttgggtgtaatcagatctgtaagcatgatccggaaagaaaaagttcctgaacagaggcttccaacatcctcagaaggaaacctctcttaatccacataagaatggtgtaaattccaacatcttgctcctaagaacactttgccctgggggaaaaaaagaaaagccatcgtaagctttcagaaggcctatgctgaggttttgcttccttcagttttaaagcataatattttgagtaactcaatgtttagaaacctcaaattttgctcttgacagataaaactgaaacctctactatgctctgctttctcacaggatgcatgtgagaataaaacacaaagtctttatgttagaatatcttgtgtaacttcaagtattacgattgtgagagagctttttaaaggtttttattttctttgtcagagctagacagagtatcttctcagcccaaaggtcaaattgtctcattttcacaaaattttcaatgatgattatagtaataatagcaatgatttctataatacttacaatggaccaggcactattgaacacgttagacatattaatgtatttaatcattaaaataattcaaccatgtgggtactattggtatccccacttaaagatgagtggaccaaaacacagaaagataaattgctttgctatagggtacgcagccaataagtggaaggtgggattgtaaaccaaactgtttaattcccaaaactactgcataagactgtatgaagaagcatgaaacaataggtttcaagaagcctacagaacacttaacaggatttttcatgctggttcatagttaagttattggttgaagatgcaacaaatctgaatggcagaggaaaaaacaaagaaagagagttctgagtgagcctgggtctccataggagcaaagaaccaagtgaagcttgggttagttgtggggtgtaagatataattagaagagaagtagctctactctggtagaagtgaaactttgaagaatgtctgattcctcacaaactgctgagtaaggataggaaaatgcatagccttggtcaagatttaagcatgaggacataaaaatagatataggcagaaagcacaagtgaaaaaaaatacatttttgaatgcatatattgtgcaagtgcctctattctgggtgctagcataccagaaacaacatttttgttccttttgtcagaggcatttgaaccagagcaactccatcttaaataggagctgggtacaataaggctgagacctactgggctgtattcccagaaagttaggcattctcagtcacaggatgagataagaggttggcacaagatacaggtcataaagaccttgctgaaaaaacagtttgcagtaaagaagctggctgaaacccaccaaaccaagattgtgatgagagtgacctctggtagtcctcactgctactctcccaccagcactatgactgtttagaaatgccatggcaacatcaggaagttacgctaagcggtctgaaaaggggaggcatgaataatccaccccttgtttagcatatcatcaataaataaccataaaaatgggcaaccagcagtcctcaggactgttctgcctatagggtagccattattttactcctttactttcttaattaacttgctttcacttttctgtatggatttgccccaaattctttcttgggcacgaaatccaagaaccctctcttagggtctggattgtgactcctttctggcaatgcttttaacttcaaaaatctcctttcaaaatgattttattccagttcacaatgaaataactaaaactctgtgtcactaagtggctttgcaaggtggcatgtgtatgtgtggcagagcttctcttccttcagaaccacattcctgagacttgagagaatgtctttggtctctgctgctagagaattttatcctggttcatggactgcagcgggaggtggaagcattttcaaactttgggaggggaatgttaggagaccattaggcatgtgctcaagagatgacaccaagtccaggcagggactaaaactttgtgcctgttgtctcatgaatcagatagcacccctgcctaaaccttcccagtcctgcattgcacagagacccgtgcttgggattggaattagtcatcaatacaaacttattttcccaaattttaatttttattctaaagactttgaatctcaagtgaataccctgatttccttccttccttctttcctttcctttcctcctcctctactttttcttctccttctccttcttcttcttcttctcttccttcctttccttcccttccttcctccctccctacctctctctctttctctatttctttctcatcttgcttttgccttccaggctgctggagtgcaatggcgcgatctcggctcactgcaacctccgcctcccaggttcaagcgattctcctacctcagcctcctgtgtagctgcaattacaggcatctgccaccaggccctgctaatttttttgtatttttattagagacagggtttcaccatgttggtcaggctggtctcgaactcttgccctcaggtgatcctcctgcctcagccacccaaagtgctgggattacaggcatgagtctgtaatgtagccttttctttaacaggctacccacagaggaaccttcccttgagctccttttcagattcttccttctgtttctctggccctttctcctttgtcttctatactttcctactgattttccttcctgtttccctcatccttaacttcctacttaaggcttgctctatcctcttcacatactgtttcttattttgcccactgggttcacctctaagtcacacacaactggacaagtaagcatacccctcagcaactcttccattaacagcccccaaacatgctgattacctggctgctccatagggtggttggttggtcttaagtctcccactagccagcacctagcagttcttcagtttgtgtggttctcagtgctggtgatcatgctgagcctgcccccttcatgcctctctggtcagtcagacccttcagaacccaagaggtaagcagagttcctctaagaatggttagcaacttaaacttcatcctgtcatcaagccagcacatactaagcatctataatgtgctagacaatgtgggtaatggaggtgatgcctggattataatatctgccctcaaaagcttatatctattttttaaataattacaggacaatttaaatgtatcagtttgggttgaataaaatcagggatgtttctcattagggcctcaacacatttggaggtgtgttaagacagtagtcagattcacaccaagagccctgtcatggcaaaccgatgtcatgtgcatctcgataatgtttttgtgtatcaatatgctttgtgaaaaaacttcgaggtagtacagccatatcctatcctgtgcatagacaggaaaatggttgctgactggcagaccagaattgggttaccttttcatctaaatgcatctctccacagcgatttctacagtatgcttgatcttgtctctcatcccatatttggttacttgttgccatgccgggaccagccatgcattggtttgcctttggcatcagtgtatgctctatacccatgttttccacagctggcaaacaccagtggtattctaataacactgttctcaccaccagcccttctggttcactagatgtttccatggagtcctgatataatagacaacttattttaaacacagttgccagccctacactctaaatgtctacagaactcaccagacaaagaagaaaagttatttagcagttgtgataagctaccacttgaattcaaggttattacaagcatgattattgacacatttggttttattgagtgtcccttatttgcccaagattcattgctgtgacaagaatgacaagaagaagcagttacttgagaaatccccttgtagccttctgttacttcatttttttccctctctctctgcttctccttgtgtatccaccatagaagctacaatgattaaaaattatttactaaaatcatttaataaaactatattaaatggaaattcaccaatagaaacttaggaaaggtaacaaagtcctgtgaggttggcttcagcatatccagaacacatgctcaggaaggaagagggtggggggaccctgtaaacaagggactttgatcattcactttgaagagtcttctgtcatatgctggatgggcaaacagcttagagggctgccttagagtgcacaaaatcagagatattcagagatgcacatgaggatggagtgagaagaggaagagagagacacataaatacctctcacgcttagtttattttttcatttaatacagaatattttttaagctcctactctcttcaaagcactgtgcttaaagctggcatgtagttgaatttatagtccagcaaggagactgaccattgagaattacaaatatggcaggaatttctaaacagaaagatgtgcagctctcatatcctgtcacagaaatgacacatcacatagctcctaaactgcatcatagccttaccatgacctcctgtttctgcatttggcttgcctccatatcaccccaaattccaatggttttgtgaagtcaagattggtggtcaaggtcgagggaaagtgcacagatcaaaagctcatctaactatgtcaaactttgtcatagctagatgagctttttgaacttaaagtttgtcaaaatttaggaaaatattttgcccttaggtggtcgcttgttgaaccctgaaaattttactctttctttagtgttgagatacctcttcctttattgaatctataatcgaccttattgcaaccatggagaatgagatagtacctggctcagaggtccacatcacataatatgtgggtgaatctatcactacactgttgtgaagccctgttctccagcccaggcattcttccattcctaacacaagcttctcctcctttacagaaatgggtctgagttgcctatttttatacctgccatgtcatgctgagtgggggctggggtttgcaaagagagaagacagctagggaacataattgctatggtaattgctttctattgtacactaaatatagtctggatgtattgcatatggtccctagtttttaatagaatcctcatgaaaatgctactttcccgctttccaataacagaatgatggaaagaccttcacaagtccaaacacaagcaaatggccaaatggcagagttgttctttttctgtgtcacataagattccagacaatataatcttagtagtatctatgagaaaaatctacctcaatatatcttctttctgcattcacactcaaaaacttggtatctgtgcttggtttaataaaagtagtgagtgtacctcatggagctgagtggtggtgatgtgtgtttatgattgtgtgtgtggcgcttttgtgtgagagagagagtgtgtgtgtatgtgtgtcaagaggttaagggcttaaaggaacaattaattggtgattaggatcatgtactcaacaccatagcttgaagtaaaaaaaaacaaaaaccaaaaaaaactgtaattccaatactgctgcatcatgacttgaaaaacgatgtctgtccactcaccggtgtgtgtgtgtgtgtgtgtgtgtgtgtgtgtgtgtgtgtgtgtgtgtgaggggttgggttcgttgtggggaaacacttgagatcctgtattgatgaaaaatgatttctccagactaatcattctgttcgtaaaactttgagttttgaagacactcagggtctctttcttcccttaagctttctctcatggaggaatgccactcagacatctacttagcacattttacaacacttgcatttccttgggctccttttccttgttttcaaccttcatgccccaatccctgcctaacttctattatttcttttttttttttaatgccatacatctgcatttattataagcaacaggcgggacacttccagcaatagaaagaaaacttaatttacaaaagcagggattcagtgaagccacctggttgttactcttgggcactcacatgtagatgccaacccagagcatcaggaagaggacttcaaagcccatgaagagtgaggccaccaaggagatactctttatagatatcacaagtgtacttggtagaggtgacctcgtaaacaaagaaccaggtggtgaagaacatgtcgatggccaaaagctctacaatcagatgggggaagacagctgggttgaccgggctgttgtatctgctcatggccttgagctccattttgccccagcaggctaagccaccactctgccaccagaagacttctgttatttcttatcttttgctttcctgacttcatctctgctctctgactaggtaattatatctaacaatgttatctattctgattcatagtatccagtagacctgatttaatcatcacattctcattataaggctcaacaactaatgttcacaattttccaaagccatagactgatcatctgatctacaaatacactaaattcctgaccatcttcgtagttgattatggctctgaatggctttttgcccaaagcatccagcaccattttcatctgggtagtttcccctgctggtaaaaatagtaaacacttttccttatctactcccatcccccgacagaaacacgggatccactatcactctctatctgggtgtggttgagatcttcaaaatctgcagtgctgatagctcagcatggaatgaagtgaaccaacaagctctctctgactttggtttataaggatttgcatacattttctgatggatactaggctcatttctgggaatatgcagcaatttaaagcattgtgcctcatgtcaaagtttgctttactcaatctgacactaatctatttggtaagtttttctttctgttagtctatacccttgtcattacagtgtcccctatcctcactctaacttcatcttttttgggagtaagtacttggtagaacacatagaggcaaagaggaagctggtttatgcagcccgaagagagcaacaaaggaaatagataatccaaaccagagtctggaactacaccagagatatcattctgtattcccgtggattttcaacttgattttttcctaactagatcactctgctagggaatgaaaaaggagatctaggattttccctcttctaggaatttgcaaaagagattattcagaagccaagttctaaagattttagggagtctttgggatgatagattcttataccccatcacatcttgactgatacattactgcatttccctctctgcaatctctgataagccaaccgtctactgctcattcctatgcggagcctctaggccaagacacactggagttctttaccgacctgttcataagtctgttcattgttgccacagatgtgactatgaacccctaagcctggtcaagatattggatccaacaccaactttttagactatactcagaagccaagctgcaaagaaaattagtttcagaaactcctccctacggcccactcctctctcctccctccttctttattctcccagcctgagggatttagaactttggaacaggagtcgctaaggtttcttcctgcatctaggttagggaattagccacatctccagaaataagatttattttaagcatcacataggggtagaaaagaaaatgtagggaggatggcctttttgcagcagatttctttctttctttcttttattattatactttaagttttagggtacatttgcacaacgtgcaggtttgttacatatgtatacatgtgccatgttggtgtgctgcacccattaactcgtcacttagcattaggtatatctcctaatgctatccctccccccgacccccaccccactgcaggccctggtgtgtgatgttccccttcctgtgtccatgtgttctcattgttcaattcccacctatgagtgagaacatgcagtgtttggtttttgtccttgcgatagtttgctgagaatgatggtttccagcttcatccatgtccctacaaaggacatgaactcttcattttttatggctgcatagtattccatggtgtatatgtgccacgttttcttaatccagtctatcattgttggacatttgggttggttccaagtctttgctattgtgaatagtgccacaataaacatacatgtgcatgtgtctttatagcagcatgatttataatcctttgagtatgtacccagtaatgggatggctgggtcaaatggtatttctagttctagatccctgaggaatcgccacactgacttccacaatggttgaactagtttacagtctcaccaacagtgtaaaagtgttcctacttcttcacatcctctccagcacctgttgtttcctgactttttaatgatcgccattctaactggtgtgagatggtatctcactgtggttttgatttgtatttctctgatggccagtgatgatgagcattttttcatgtgtctgttgactgcataaatgtcttcttttgagaagtgtctgttcatatcctttgcccactttttgatggggttgtttttttcttgtaaatttgtttgagttcatcatagattctggatattagccctttgtcggatgagtagattgcaaaaattttctcccattctgtatgttgcctgttcactctgatggtagtttcttttgctgtgcagaagctctttagtttaattagatcccatttgtccattttggcttttgttgccattgcttttggtgttttagacatgaagtccttgcccatgcctatgtcctgaatggtattgcctaggttttcttccagagtttttatggttttcagtctaacatttaagtctgtaatccatcttgaattaatttttgtataaggtgtaagaaagggatccagtttcagctttctgcgtatggttagccagttttcccagcaccatttattaaatagggaatcctttccccatttgttttttttgtcaggtttgtcaaagatcagatggttgtagacatgcggcattatttctgaggcctctgttctgttccattggtctatatctctgttttggtaccagtaccatgctgttttggttactgtagccttgtagtatagtttgaagtcaggtagcgtgatgcctccagctttgttcttttggcttaggattggcatgtcaatgtgggctcttttttggttccatatgaactttaaagtagttttttccaattctgtgaagaaagtcattggtagcttgatggggatggcattgaatctataaattaccttgggctgtatggccattttcatgatattgattcttcctacccatgagcatggaatgttcttccatttgtttgtatcttcttttatttcattcagcagtggtttgtagttctccttgaagaggtccttcacctctcttgtaagttggattcctaggtattttattctctttgaagcaattgtgaatgggagttccctcatgatttggctctctgtttgtctgttattggtgtataagaatgcttgtgatttttgcacattgattttgtatcctgagactttgctgaagttgcctatcagtttaaggacattttgggctgagacagtggggttttctagatatacaatcgtgtcatctgcaaacagggacaatttgacttcctcttttcctaattgaatacctttttttccttctcctgcctaattgccctggccagaaattccaacactatgttgaataggagtagtgagagagggcatccctgtcttgtgccagttttcaaagggaatgcttccagtttttgtccattcagtatgatattggctgtgggtttgtcatagatggctcttattattttgagatacgtcccatcaatacctaatttattgagagtttttagcatgaagggttgttgaattttgtcaaaggccttttctgcatctattgagataatcatgtggtttttgtctttggttctgtttatatgctggattacatttattgatttgcatatgttgaaccagccttgcatcccagggatgaagcccacttgatcatggtggataagcttttggatgtgctgctggatttgctttgccagtattttattgaggttttttgcatcgatgtccatcagggatattggtctaaaattctctttttttgttgtgtctctgcccggctttggtatcaggatgatgctggcctcataaaatgagttagggaggattccctcttttactattgattcgaatagtttcagagggaatggtaccagctcctccttgtacctctggtagaatttggctgtgactccatctggtcctggactgtttttggttggtaagctattaattattgcctcaatttcagatcctgttattggtctattcagagattcaacttcttcctggtttagtcttgggagggtgtatgtgtcaaggaatttatccatttcttctagattttctagtttatttgtgtagaggtgtttatagtattctctgatggtggtttgtatttctgtgggatcggtggtgatataccctttatcattttttattgcatctatttgattcttctctcttttcttctttattagtcttgctagcagtctatcaattttgttgatctttttgaaaaaccagcttctggattcattgattttttgaagggtttttttgtgtctctatttccttcagttctgctctgattttagttatttcttgccttctgctagcatttgaatgtgtttgctcttgcttctctagttcttttaattgtgatgttagggtgtcaattttagatctttcctgctttctcttctgggcgtttagtgctataaatttccctctacacactgctttgaatgtgtcccagagattctggtatgttgtgtctttgttctctttggttccaaagaacatttttatttctgccttcattttgttatgaacccagtagtcattcaggagcaatttgttcggtttccatgtagttgagcggttttgagtgagtttcttaatcctgagttctagtttgattgcactgtggtctgagagacagtttgttataatttctgttcttttacatttgctgaggagtgctttacttccaactatgtggtcaattttggaataggtgtggtgtggtgctgaaaagaatgtatattctgttgatttggggtggagagttctgtagatgtctattaggtccgcttggtgcagagctgagttcaattcctggatatccttgttaactttctgtctcgttgatctgtctaatgttgatctgtctaatgttgacagtggggtgttaaagtctcccattgttattgtgtgagagtctaagtctctttgtaggtctctaaggacttgctttatgaacctgggtgttcctgtattgggtgcatatatgtttaggatagttagctcttcttgttgaattgatccctttaccattatgtaatggccttctttgtctcttttgatctttgttggtttaaagcctgttttatcagagatgaggattgcaacccctgcctttttttgttttccattttcttggtagatcttcctccatccctttattttgagcctatgtgtgtgtgtgcacatgagatgggtttcctgaatacagcacactgatgggtcttgactctttatctaatttgcccgtctgtgtctttttactggagcatttagcccatttacattaaggttaatattgttatgtgtgaatttgatcctgtcattatgatgttagctggttattttgctcattagttgatgcagtttcttcctagcctcaatggtctttacaatttggcatgtttttgcagtggctggtaccggttgtgcctttccatatttagtgcttccttcaggagctcttttaggtcaggcctggtgatgacaaaatctctcagcatttgcttgtctgtaaagtattttatttctccttcacttatgaagcttagtttggctggatatgaaattctgtgttgaaaattctttcctttaaggatgttgaatattggcccccactctcttctggcttgtagagtttctgctgagagatctgctgttattctgatgggcttccctttgtgggtaacccgacctttctctctggctacccttaacatttttcccttcatttcaactttggtgaatctgacaattatgtgccttgtagttgctcttctcaaggagtatctttgtggcgttctctgtatttcctgaatttgaatgttgacctgccttgctagattggggaagttctcctggataatatcctgcagagtgttttccaacttggttccattctgcccgtcactttcaggtacaccaatcagatatagatttggtcttttcacatagtcccatatttcttggaggctttgttcatttctttttattcttttttctctaaacttctcttcttgcttcatttcattcatttgatcttccatcactgataccctttcttccagttgatcgaatcagctactgagtcttgtgcattcatcatgtagttctcatgccttggttttcagctccatcaggtcctttaaggacttctctgtattggttattctagttagccattagtctaatttattttcaaggtttttaacttttttgccatgggttcgagcttcctcctttagctcggagtagtttgatcgtctgaagccttcttctctcaacttgtcaaagtcattctctgtccagctttgtaccgttgctggtgaggagctgcattcctttggaggaggagaggcactctgatttttagagtttccagtttttctgctctgtttttccccatctttgtggttttatctacctttggtctttgatgatggtgacgtacagatgggtttttggtgtggatgtcctttctgtttgttagttttccttctaacaggaccctcagcttgcagcagatttttaaaagaacttccaggaccttgtctgtatattgacgcctatgtcactacaggaatcagagcagggcattacattgatcctttaagaaaattttgctaccctataccccttgaccctactcttttttttttttttaatttttaaaggtaattgttagaaatttcccaaggtttatttgaaatgacacaccactgaaaacataacttttacagatgatttgtggatacagtacacatcacctatcttactttaggacagtctgtgaagatgatatttttcctgctgcagttcctttgtcaagtgactttagacagatacaggactgcaagagtgactcaggtcatgctggcataggagaagcaggtgctagtgtttcacttgaactagttgttgggctggggtggaatgaaagctccctaggccatgaggacatctttgcaatgtggagaggacccaaatcagtgggtgttgctctttgaatgttgaaggccttgtcagcatactggtcacccagtttcatcatcacttcatactgtttgtaccaaagcaccacagtttccttatgaaacttagcttcaaggctggagatgtttttgaaagtattaatataaaatccaattcgtcttgactataataatggtaacttttcttgtaagtcaccattaaactcttcaaactttctctatgctttctgaaattctacttctgccttagacagaggctcctatccttcctcctgaagctctgttgagcccgatggaggtgggcaggcactgtcatagtccgtaagcttcctgctgcacttggtgatgtgattcttcaagtcaggaaattggtccaggtagttttccagtgttagcaaggatgcatccatgagttttttgtggatatcctcccagagcacatcacctttctcaccaaccattttcacaccttcctgcccagaccaatccagcgcacagacttcacacagtgactcagcttcgtcaaggtctcttgaatgcctttgattgcttctaaacatcctcagagttctctcaggtctggtaccctctgcttcttgtggcttgaagttctggacatattcttcaaactgtttgtcttttgtctcagcagctttccctggcttctggaggacgttttcctgtgagtggctgagtctcttccaggcattcttggcaaagatgccctcttgatgttggccagggctgcaggtccaggacctgggaggagctgagcgctcagtgtggctggtggcgtggaggggcgggaggaagtggggaggatcatgaggaggggtgaggtcttcgaccctactgttgatatgttgttcagggaccatcgggagcccagagctctgctctgtttcacgggactccacaaagagaactgcaagtcccagtctttcacctctcttggactttttatcttgtctcttcatcacatctcttcagtataaggaagaacagaaagggaggagagaaactcagggttgtcagtcaaatgtgtccatttacagaatttataaaatgtattgttatcctagttatctttatactagcctgctatggcaggtttcaggatcactggacctagagggtgagtcaagaaagattttctttgatgtggcttagatccccctgaattcattcccaaaagcccaagggaagaaagaacaggattaagtatacattgcccatatcttggaagacaatacagagagcagtaacagacagaagaactagcagacacacagaaagacatgggtcactttaaattttatttattcattttaatgaaaaattatattttgttaaaaatggtctatgtgagaagttctgtaatacagtagggaataagaactatgttatatttaccatcctcgagcacacagtcaagaagctacaaaagagaaaggcaaatttcacacacagccaagttgagtaaaacaaacaaaatcttttggtctaatcagataaagatcatttactagcctggaaactattgtgaaggtattattttatttttgttttctctgtgttatttatacatcccaagaatcctaaaaaatccccacctttctgtgatgaagagtaggtgggcagccatagatcactgagtgtcagtatgacagaggccagagatgaggggcatccagctgactggtcactgggtggccccttgtgtagtccaagcacatcataccctgtattttggtcaaaagaatatctttcttttaaaattaatttaaaacttatcatttgagtcatggatactggctcttcacctggccataggaccacaaaccccctcttctcatgcctagactctgaaaagaatcaaaagtatttggagccagaaaaggccattttatcttctagttatgagcattgcctccatcctctcccttcctccccactctccacatatgaccaactgtttgtttttcaactctgctattttgcacatgccagacacccctatctagtcttatctctgatgttcccctaaaccagacctctcataccactttatgaaaatgcatctctctgttcagtagtaactggaattaactatcaagacaatggtcatctgaattagaaattatatctctgttttcaaattattatcaatattatttgataaatgttaaccaaagttttaactgaacacatttctcatagagatactttccctagactcatcattttgaattgagggaaatggtttaccctcattgaagaaagtaattgagggaaatggcttactctcattgaagaaagtctcatttcttcacgtgcaattttctagaaacagcagccagctccatatatgcaagagaactggatgtatgtctgaagccaaaaatgccttattcctatgtataacaggactaatatatgcaagccatatggagagcaatgggcattgactgaaatgccggtgacccaaatcatagacccaagaattatatatataattggttcatatatatatattatttatataatatatataaacacacacagatacatacacacactattatatattaagtatatataatagtgtgtattatatatattaaatatatataatagtgtatgggtatgtatctgtgtgtgtatatgtatgtgtgtaagtatgtatgtatgtgtatggtgccagccataagctaatcaaacaatgtgagttaaattacctgagaaaacaatatcagttgagcactgagatatgtacttagtgttgtacatatatcttatacaaatcagcaatagacaggcagggtaaaataatgttctaagtagcagagggattgactgatttccactgaaatgctcagggattgattagttctcattgaaatgactttccctagttacttatgctggcaacattgtcatcctgtccaggtcccctgaattattcctcagagaccagtgaaacaatgtcatgctctagagtgaggcagagagaataaacgaagtatgccactctgaatctgcttagttttaatgctatagataaatgggttcataaaaggtgggaaaaggaagtggatgtagctcattgtgatgtgaacgacatgaggaacatgctttccaaacctatgaataaatgtcagacaaactacagtgacatagaagaccaggatgcagcagatatgagagacacatgtgttgagggccttggccctttctcctccagaaccaatgcccatgacagtcttgagaatcaaaatgtaggagaaaaagatgatgagaaagtccaacaagaccattgcaaataaaactacaactggatagagacggttgaaggtgatgtcagcacaggctagcttgatgacatcttggtgtagacagaaagcatgggagagtacatgggatcgacagtagggaaaccagtgtaggcgaacaactattggcataatggacagaccagcccttgtcaatacccgcacaccaatcttcattacctgggtgttggtcaggatagaggtatatcttaaggggctgcggatggtaatgaaacagtcataagccatggcaagcaagacacctgactccatgacagaaagagtatggataaaataggcctgagagaagcaggctccatggccaatctccctgtgatctaaccacagaacacctagcactgtgggcattgtggtcaatgtcactccgaggtctgtagctgccaacatagctaagaaatagtacatgggctcatggaggttatgatcattcctgatgagaaagagaagagtgccattgccaagaagtatggagatgtaggctgccaataatgggatgaatatccagtgatgtgccttctccatgcctgggaagccagtaagctggaaggtggaagcagacttattgagccccattgccagctttgcaaagaggcaaatatttactccaggtaaagcaatagtaatcagttgtataaaagttgctccttgagaattctacctgttcataagatgttcaccagtcctgactttcagtgacagcaaggatgataatttagtcattcctgggagatcctaggtatgggaaaatagaatgtataaagaagatattatttagggtttactctatgtaagattattggatactacgttggggatacagctattcatgcagaataaacattgttgaattcattgtaaatcatataacccagaaaataaaaacaaaatgaaagaagaaatcactatatttgaatagtgctgtaatggcctgaaacttataggtcacttttcatggtgctcttcatcctgactggtggtattatagggtggatgtaaaggtttcccaggctatgtgagacctaaaagatcagtagaaaaatggttctaagcactattggaaaagcagatataaagattatatggaaaaacaaatacacaagtaagaaatatatgagcaaatacaataaaatagtaaatttcagagattgacttttcttcaatattcctggagggaaaattcaattgatgaagctccagagacttttgggtagttagaaaatgacgtaagagtgacttacctgtgtgtgtttccaaagcacatagaactctaagttgcccagctttataaccctagttattgatacactgcttcaaagaattcaaattttcataatataaattgaagaataaacagtaaaatgtggatttgatgataagcttttgaaggcactaattgataatagcaccaaactactgttgcatatcacctacttggtgatgcaaaaataaaaattggtaatttaggcaagatcaaggagaattttttttttaaaactatggaatctgatgggatttgacaaaagtgagaaggctctgtgactcattagaattctaagatttcagctggtgcaggcagccaacctctgagaatacataaattgtgtgttggtggcatgagccagagaaaataggcccaccttctcttatggttggtttggactatacatctcatatactattgaaagagcatattgatgtaaatttatgcacgatttacaagacctctttctgtccatgaaaagaatgcatccaagattactggactttcattttcagaagaatttgttgaagtttcagctctgctctttctaacaataatgatcttgggaaagtaatttaatcttgagatttggttacataacctgtaaagactactagtgatttctgtcttctcagtcattctcttgacacaaagtaaggggaaatgttttgtaaagagtggataatttttttatttttgtgtttttgttattgtttcagagaagtacctcctttctctttctctagtgagtacatgtcaggattattcacccagaggtgtgtcaaatgatttcctttttttctgtggaagccttgggaacagatataagatgatgatggggtttttaggagcctgtgtttgactttaaataaagatattaaactatagtttctctaatcagcagataaaatgtgatatgtctgggtgggaaagggaaaggagaaaagattgatgagccaatgtgggaacttctgacatagctaaaagtaacgttgagcctggggcattgggactgagggaagtagaggggaaagcaactctgtcctcaaaaagtgagaaaaggaggtattattgctcaatctgcctgccagtgagaggttcagacaatactcagcttatgcaggattaaagaagcagtatggcaaataaaaattgtacataggtatataacttattgttttattataggtattcattgttaaatgattaccataatcaaactaattaatatatctatcacctcacataataactttaatttttttggtagtaaaaatatgtgaggtctgctttcttagcaaattttaaatatacctaaataaagctgggagggaaaagataatacagaacattaatctagttaattgtgttatattactactaaataaacatataattgataaattaaaaaaaaacaggagtaggaataccagatagggaaaataaagctgagaaacaaatgtatggaacaaataattgttgaatttctaccgtgtgtcaagtattggactggggcattatatacacctcattttttgggaagaatccttaaaatagctgtttgtcttgtctgttttcatattgaaaactgagtgctttcacttgattcactcagttgcttttgtggtatatgagatgatctgtgagtttcagaggggataaaaatctaaaacctttgcctcatccctgcagccattcaccctcttccagggtctctgtcatagaatagacttgagtttttattaatgagaaactaattctcaaagtctcaaactctgccgcataaactgatggctctatgcagacacctcagcaggagcccattcagatgttaactttcatatattctctcaccttccctttggcttttttccttcacttttcctgacactcttttctgtctcaagcacttagtatctccatcctttttttacccccttacctttggctattatcctttctgtgatggttaatattgagtgcaaacttgattggattgaaggatgcaaagtattgttcctgggtgtgctgtaagggtgttgccaaaggagattaacatttgagtcagtagactgggagaggcagacccacccaccctccgtctgggtgggtactatctaatcagctgccagggcggctagaagaaagcaggcaaaagaagatggaagagtagtggatgcctgttacacaatataaacctttccaggtgctaaagtcacacaggctatgtgaatctgtacccctgatccagaggcacacataacccaagctccgtccaagcttaattttgaattggtttattagtcatatggtcagatagtgactttttttctagaaagtatttgaacctctgatgattacagaggtatacctcctcaagaatttggaagagttgattctatatttggcacttatctggacttctaaggtaaaagacatggggttgggggcagggggactctcagggttagaatggaagccagagagattaaagaatcagtcaggtggagagaaattactacaaccccataattcatgcctgagtcaacacccatgctctggtttgttcgtagaattgtttgccttatgtgttccagaatctatccttcacttttttatatttgaagaggtaactctcaaagaaaccaagttttagagatgtcagggagtctttaggacccatgcctactacatatatctactcttagcagacaacactattacttttctcttgctaagaaatcagcttcgatctctctgttttttttttgccttggttcctgcaatgagatcttacagaggagattcattaaataccctcactgacctgaaactttgttcccttccattcttcagttccatagtcatgtatctcacatctttagccgtatgaaagatttgggcatcatcttttcagaatctgcacatgagcctggctggtaggaacatttattttagaagctcctccccagagaccattcctgatttagataattattgttcttccctccctccctcttctgctccctcctctcttccctctctccctacctccttccttccatctttttctctattatttgtgccctcagccttgtgggtattgggctttgaacagcacaactcaagatctctgtctctgtcctggcttttactggaggttttcctctgttggaggttgaatattttgtctacattgtggctttggctcttgctgtgctactttggaattattttatctcattgcatttcatagtccttactgtaaaacgcatataataattgccatcacaaagtgatgtggtgtgcttggctgaagcaccatgtgatgagtatgcctgctgcatcccctggaaaagagaaaacttctggtaggctaaactcaagaagggaatagttagtgataactgcagaatgtgcgttcacgttgggtactagagaaggctgcctgaattttattatattgactctagtctatctagctctctgctttcaagctttctctgatctaaaccaagcaggaaatatagtagaaattcaggttacataggccaagaagatatataggctttctcttgagataaactgggaaagatttgactgttgaagtaaatgtagggaataaattacctcccagaggtgataccagagtctgctggggctatgaagacaggctgtctgattccccacacataaaggtcctaccagtggcttgattcagccagtaacttatttgaaaaaagaaagattatttaaaagcttggggggactaattaagtgttccagctccctctaaggaggagttaatacagagtaaatatttcttaagatccaagttggctataaaagggagacatctgggaaggtgctatctttattaataaccacagtgactgcttctcttcacagatgttgagaaggaacaacatgatctaagtctttaggtaagacacaagaaccctgctcttcctcaccatcaaacaagttatggtacctgggagtatggtgaaatactcctagatatataaagagtgtactaggagactcctctataagctctccagagaaagatacggagaagaagtgaaggatctcaatagtccacagctttggatgtgtgcacagatttcagtctgaagttgatagaacttcaaaagcaattccaagtgctaccaaccaactacctaagaccttctgtactcagtgatgtgaatatgattgaccctctcatatgtcttctttcctttctaaaagatgaacaggaaggcacctcttattctactacattttactttttaaacaaagcagagaaaaattatggctgtaaatgttagaagtttatctgattttctaggtgttccattatagaatcttcttgcttctatcctcagtctttatgatctctttccttccctatattttttttcctcagcttttatctcttctctcattgtctttcttctcagaaaccaagagccacgactagctgaggacacaagaattttcacaaaacaaagtagagtgattccatagatcactattatagctgcattaccaggtatgtctgcatggaattcttgggaatggagaaggaggaaactttaagttgcaggttattattggcaaaatacaatcattgccttacagtttggttagctttccctgtagtgattcatcacttgtgctgcatattctctgataagaaggaatttttcacaaagttgagatacagtgaaagattaggttaaaggagattattgctgaaacgtcagagaagtaagagtgttgacagagaaatgaagtacatagaacacagaaggggaggagctaagctggattatctttgcgtctagtaactgaagaatatacatcactcattgtatgttcagtaggcactgaattctggtttatgtctctcagtcctaggacagaatatggatgctgaaaaatgattctttcaaagtgctgagttgttgcctcacgcccagttgtctggcatctcttcactgaaactattacagttagatctcatctctatgggtggaaggtaagaggatcgtttcctttggtggcatctttagggtagtgccttacactgacaaagtaactctgaaggggtatatttggatacgaccatctttttaacttaggataaaaacaacttcaagaagttgttctggcatgtgacaagaaaaaaaagcaagggatgcatttgctctaattcagctatatttactaatgactcttgatttcctcacaagtgaatatgtatccccctcagacttccattttgagtaaatggcttcaccattctttcatttgttcaaacagaaatctaggggaaacctcatttgatttttccctcactcccatttttaatatatcagcaaatcttggcactacttcaaaaatgcatctgtctctgtttaagtttttctatttttctctttttttcatttcccctgcttctctcctagtcaaggtcaccatgactcttcatatggatttttaaaatagctttctaactcatctcttttcttgtctcttgcttagtcttcttcacatagcagtctaagtgagtaatttaaaaatacaaatcagaatatatcaccacactattttccattgtgattttcaaagtgtcctaatgtctttactacatttatagtaagaagaaaacaaaacaaaacaaaaattccgtggtggtctgtaaggccctatgacacttgattactacctgcttctttgacatcatctattgtccctctcctgttttcttatcaaatgccagtcatgctgattttccctctggaacagttttcctctaggtctgtatacggtcaggttttcttttgtattgaggtctcagttcaaatgggacctcctcataggtgcagttctaggcccctcaaactgctatactatcttgtatacaataccatccaattaatctacatcaagtagtactgttttatgttaaacttgcatttatatttgtttaaaattgtcttatttatttttcaacttaatttatggtttataagattagggactttgtcttattaccatttaattccagagagctttaaatatcatggctgtcacatgatgcgtgttcacaaatattaggtgaactaagaaatgtttatcagtcacatgttagatactttgcaaggtgttgagcaaagcaaataaacaccatgtctatatgcaagaagcccctagtctagtggcagaaggaatattaaaaccttctcaaaggactaatctcttctcttcagtaaaagacagcaccacgtttaagcagggaaatagctctcactcagtattggggagaacagattcagaagcctatggctggggataaagggaaggaaaccaggaagatggatgtttaaatataaatggagaacttgaaatgagagaggtcagattctagggaattacttcagtaggcctatagaaaaataatttaaaaagaaaaagacactacttgtaaataagaaacagtaagatgtttaaactgaaggagatacactattataagtgatgtctttggctggcctaatcatttattccagccccaaagtctaacttataattagactgagctattgtcacaagtagtgagtagtactgaaggattctacaagagggtaattcacactaatcgtgaatgtctgttccccatcactagtccatgaaatctggaggccaagtgtctctttctcaatctgactgctccttagctacagtggtagtggcagagtttctcttcccacacttttctttcttaggctgttgagactttagctgataattcaggtaagtctttacatgcaggaaaatgtggattagggatcactactgtgaaggcaattacaggtttaggtggtagaccagaaaaaaattagtgttagctttctggaaatccccttgaatgccccatagaatacgaattctttaaaatctgcatagttaagggtaacagtttagaagttgtagtttacataattttttttctgaagagaatgcttaaatgcatataaacagttgaaactccaagaatttgattacgtaggtaggagatagatcctggaatgtgcagttaagaatacaaatagtatgagtaaccctgagaatgtattttgagaaacaatcacttatattgatgtcattattatctttaggaaaaaattctgagaatgatatagtcgaagtgataccttgaaggtagaactgtgcactgtggtaataacagaaacagaaagacatttcttctatataaacccaggatgtcgtccagcggcagctcccatcccttcctattgactggttttccaggcttggaggaagctcatcactggatttccgtatttttcttgttcatgtatatatccatcctttttggcaatggcaccctccttcttctcattaaggaagatcacaatcttcatgagcccatgtacttctttctggccatgctggctgccacagacctggggctggccctgaccacaatgcccacggtgctgggagtcctctggctggatcacagggagattggaagtgcggcctgcttttcccaggcctactttatacactcactttcctttctcgagtctggcattctgcttgccatggcctatgaccgttttattgccatctgcaaccctcttagatatacctctgtacttactaatactcgagtagtgaagattgggctgggagttctgatgaggggatttgtatccgttgttcccccaatcaggcccctctatttttttctgtattgtcactcccatgttctttcacatgcattctgccttcaccaggatgtcattaaactcgcctgtgctgataccaccttcaaccgactgtacccagctgtgcttgtagtctttatatttgtgctggattatctgattatcttcatctcctatgtgttgatactcaagactgtcctgagcattgcctccagagaggagagggccaaggctctcattacctgtgtctcccatatctgctgtgtcctggttttttatgtcacagtgattggattgtctctgattcatcgttttggaaagcaggttccacatattgttcacctcattatgagctatgcctattttctgttccctccactaatgaatcctataacatatagtgtcaagaccaagcagattcagaatgccattcttcacctttttactacccatagaattggaacctgatctccaatcatcacagtcactctcacagaatgtaaaaactctaatatttagcaggagagcaaagaagtctcatatctagcatgcatgctcatatgacttggtaaaataggtgttaaaatacagcttcaagtttccctaaggtatctctttaagcccaactctttagctaaatgtagtttgtacaaatttttgttgcattcctgtaaacggaatatttctctaagctttccactaaattattgtgataacaataccttaggcatctattggtatgtctataatgtaactaacatatgtttatttcatggtataaagttagcagataggaacagaatcataaaaatataaaattattagttggttcgagtgaaatggaatagagtttggtttactatgtcaaatctaatttccaactcttatgaatttctctgcaggtgtccatacaaacaatgggaacctataaatttggtcactgaagtccaggaattttcctgcaaaaaagaatataatcttctttgatcagtgacctaattacttatcatctcaacagtctagttggttcctcctccctccatcaaattataatgaatttgtctcaaaaaccataaactcatatttattccccaaggcagtaccttctgacaaacttgtaacaaaaaaatgtgagaagaggaatcacggataaatgagaggacgtagacacagtcagtacctccttctatcttgctctcattcttattctactaccctagttgctagctccaatgttgaggccatcctcagatatctacgctggctgactagtccaaattagtggaagagacagttccttcaccctccttttgctatgaaaaaggtctgaaggaacaaaaaaaaataggtttctgcatttttttgaagaatgattgctttctgtacatacattctgattccatgtaataagtgtaaatttcccaaagaatacaacaatgtcattctcatttgattaaaattgtctgatgagttaggaagggacccataactcaatttaaaatatcctaaaaagagggaggttatgtcttaattatactttaatcagagcaaaaataatacttcagtgagacaagagaggggactatatagaagatattgtttatgtctttggtgttttaccccgatcattttacagaattgtgcacctgtgaatgttggctgctcattgttcatgtttctgctttctgcaggttgttgttctcaactcagcaggaaatgtcttatgaagaaaatggcccctgctccttaggtagcaggccataggcaaatactgaccctcttgccttctgaagctaagctccagcttcagtatgcacttgcttacctccttcccctgtccacactgcttttacttgctccctgtctcctgagagcattcattaataaattgcacacatttgaatccctatctcaggtattgctcatagagagtccaacttaagaaaaactgcaatccttatttatattctgtttcattaagagatgtaattgtgaaagaactgaacatataaaaaaatcagctttatcatgttttttatccttgtcacgccatgtcacctgagcaacacagtctgaatactaaattgtgagtgtgagtgcatatatgtgatggtaggtttttgtcctgttttcaatcattcataaaaccaaacatgtgtcccttaattatgctctactacatccacaacttattttattcataaaaatattgtggggtagatattatcactgttttcttgatggggaaatttaatataaaaaagttaaatattccctccaagggcataacatttttaattggtatagtcatgattcaaatttatatcttctaactataaggccagtgtgaatggtactccactacagtagactatccttagtggcttctactttttgccttgtattccgtcatgcttgtagtacctactttctttttctgaaaatttctcctccttctactccaaaaatattgttccctatgaaaactgatattttgcattgtatctccaaactcctaaccgcagtagaagaacttttttaaaaagaatttttcaatatgacattgcaaaaaaaaaaagagtaatgcttttgttgtagaattactaaaatgcaatgcttagaattgttaatgacaatgtttttcatcaggcaagtgacttcaaactataataaatatttagagtaaattatagataaagaaatgataataaataaaaagaatcttcaaatctctgattccatgttttcctgagactcagtgacaaggaggacagtttgaatcttttttttgattccacagcctaataaactcctcttcttgtaatttgttttgttcagcctagtttcagttgagtttcacttataaccaaaggctattaataattatatcatctcagttatagatatgtgaatcttctctaactaatatttaaaactggaaaatactgttaggtagaagagctgcctctttttctaaaatacaggaaatggaacctaaaaatggcaggaaagttgaccatttggtgaatgatttatgaagttatttcccttgtttaagaagttcatttctgacttgaaagtaagtgtgaaactaaattcactgagaagatgctgtaggatgaatacagacacaggacatcggaggtggggggaagactaaataattatctcaaacttagttatacagaaggctacatggtggaaatccactcagacatgtttttctattcaaaacccattgtaacaatcaacataaacacagtatgttagtattatcataaaatttagaactttctgtgatctcctacaagtcttcctgtggtaaaatgctatgtactattagaagccttagcaaattaatacaggaacagaaaaccaaataccacgtgttctcacttatgagtgggagctaaatgatgagaacacatggacacatggaggggaacatcacacactggggcctattggaggatggagggtgaaaggagggagaggatcaggaaaagtaacaaaagggtactaggcttaatacctgagtgagtgatgacataatctgtacaacaaaccctcgtgacacaagtttaaatatgtaacagacctgctcttgtactcctgaacctaaaataaaagttagttaggaaaagaagcctatttataacactatctcctaggaaacactgcacatgaatttgtattcataagaagagtagaattcagagtggtccagtggactaacaaactggtgaaccaccttcttacagcaggtgaagcctgtaattcagcttttcatcattcaagactgaaagaagaatataacttatatagagaaggacctcatgaggaataaatttcatggtgcctattaagataaataagtaccatgtagttatgggaaatctaaggtgtaaaagaatatacattaaaaaaagcccttgccaaataccatcctttctttttcaaataataatatacttgtgtagtatgggcttgaagggataacataccataagaatatttaatttgagtcaggaaatgaaaggctaagtgtgcatttctgtagactaagccaatcttagaaatgattaagaagacgtggaagaatcttagagacacactgaaaaaatatgtatggtctaatgagtttacagatcacttttcctcccatataaaatgaatttatactagataaggggaagatgaactttattcctctcattaacaaataattgctgggttccttcaccagagatgcagatttttatagggtaaatgaaaggtgatatatttaaagatacttactagattatatgagtattaaattgggcagcaaggatgattagaaatgattaaggacccagaggtctccatgtccaattaaagaatgtaaatctgtttttgattttatagcctaaatccttagacacagtcattgttattaataaactcatagacaaaatttattttatgggaaatttaggagtttatgtccctagatttcaagtacatgccaccaaactgacagatgacagtgattagtcacaaagtgcctcaaaaatagatggccctatgttagtcatggttctccagaaaaatagaatcaacaggatttacccaacttcaaattatactacaaggtgacagtaactaactgaaacagcatggtactgataccaaacagacacactgactaatggaacagaatggagaactcagaagtaagaccgcgcatctgaaacaatctgatcttcaacaaacctggtaaaaacaagtaatggggaagggattccctattttataaattgtgctgggagaactggctagccatatgcagaaaattgaaactggaccccttccttacatcttatacataaattaactcaagatgcattaaagacttaagtgtaaaacccaaaactataaaaactttagaagaaaacctaggcaataccattccggacatagacacaggcaaagatttcatgatgaaaatgtcaaaaacaattgcaacaaaagcaaacactgtcaaatgagatctaattaaactaaagagatcgggcatggtggctcacgcctgtaatcccagcactttgggaggccaaggtgggtggatcacttgaggtggggagtataagagcagcctggccaacatggtgaaactccatctctactaaaaatacaaaaaatgtgctgggtatggtggtgcgtacctgtaatctcagctactcaggaggctgaggcaggagaattgcttgaacccaggaggcagaggttgcagtgagctgagatcgcaccactgcactctagcatgggtgaaagagtgagacttcatctcaaaataaagaaaaatacaattaaatacagagcttctaaacagcaaaataaactatcatcagagcgaacaggcaacctacagaatgggagaaaatttctgcaatctacccatctgacaaaggtctaatatccagaatctatgaggaacttagacatatttacaaaagaaacacacaaacaaccccattaaaaagtgggcaaaggacatgaacagacacttctcaaaagaagacatttatgtggctaagaaacatacgaaaaaagtctcaatgtcactgatcattagagaaatgcaaatcaaaaccacaatgaaataccatctgacaccagtcagaatggtggtttttaaagtcaagaaacaacagatgctagcaaggttgcagagaaataggaacacttttacactgttggtgggactgtaaactaattcaaccattgtggaagacagtgtggcaattcctcaaagatttagaaccagaaataccatttgacctcacaatcccattactgggtatatacctaaaggagtataaatcattctattactaagatacatgcacatgtatgttcattgtagcactattcacaatagcaaagacatagaatcaacccaaatggccatcaatgatagacaatttaaaaaatgtggtacatataaaccatgaaatactatctaaccataaaaagggatgagatcatgccctttgctgggacatggatggagccgaaagccattatcttcagtaaactaatgcaggaacagaaaaccaaacaccacatgttctcacttagaagtgggagctgaacaatgagaatgagaacacatggaaacagtgaggggaagaacacacactggagcctgtcagggcatggggtgtggtgaaggggagcattagaaaaaatagctaatgcatgctgggcttaacacctaggtgatgggttgataggtacagcaaaccaccattgcacacatttacgtatgtaataaacctgcacatcctgcacatgtacctcagaacttaaaaattaaaaaaattgaatgtacataaaaatatggaaattaataaatgtaattcactgcattaaaaaaaaataatggcaaaaactgcaattactgttgcaccaacctaatataaggaaatagcagatgtgattatggaggaaggcaagtcccaagatatgcagagtgagtcatcaagttgaaaactcaagagagcctggtagtttagtcccagtccaagtctgaaggcctgggaaacaggaggattgatggtgtacttgcaacccaaaagccatcaggcttcagacccaggaagttttgatgtttcagttcaatctaaaggcagaaaaaaaggtctagattccagtttgaaggccatcaataaggaataattctctctgatttggggaagggtcagactttttgttctattcaggttttcaactgattggaggaagccgcctgcaataggaaggaccatctgctctacttggtctaccgatttaaatgttaatcttgcctaaaaacaccctcacaaaaacatctagaataatgtttgacaaatatttgggcaccccatggcccagtcaaattggcatataaaattaaccatcagagcctgtagaggatgagttaaaggatggaatcttcggagataattgtggaatccagaaggctgacagataatagaatcaaactacacagaaaaaaaaaaaaaagaagctggtattgtcagcacagacttactcaacaaacagcaaaaatcctaggatagagaccttcctgaatcgttagcgatataagcttattatacttgaatgttgccttcctatatgccatatgtaatataaggcagcagttagatatagactgtgatgccagagctcagaccaagagccaaggaataggaagaccagaaaaatattttcattttaaaaagttaggtaatttctaataatgtggctgcctgagtattttcagcacagatattctaataaatattgtgttatgtgatttagaaagagacaggcactcagcggatgacccttgtcaggaaacactgcatcaaagaaggcttttattacaggagatggaggtccttcccaatctgagattatgctgctgtgacatgatactttacttcacaggcaatacagcaggaaatatgaaaagaatgaacaaggtcttagaaaatacatgaatgagagacacatcaatggctatttaaggaaatagaagatattttgggtgccctgcctacttcctcccagtgcccctaagcttggtgactttgagtgttggctgataatagttgttcccattctctggaggcttatcctccaccaacagtgtcacttcacatgagattttatcccaactctggggcagtctgcaggaaattactttatatctgttctaagataagtgatgtttccaggaatagagtcatatttatggggcagaagattcgtgtactgccagtgagagggtcaatatacctactaatgaaatgggagggcagcctgaaattaaatcagttatctcagggtcttactacctcacctcattttaagttcaaagcatggctcccctaaatcaatccagacctaaattttaacttagtacaaagaggacacacaaattttcagacttaagccatttccagagactgacttttaatcatgatttcctactactattctgcttacatttaggaagacctatgagcagaatgcagttcaggaggaacttaactgatgtgaaatgtcaggcaccaaaatgtgaccctcatggttcaccacattgcacccatactcattttaaaatctcatagttgggctaagttccaggataaatttaggatttaagactgatgagacaatagaaattctcagatccttatttctctgacagactatgagatgattgtattcaagtacaaattgtcagacaaagccagggattaaagaatacctccaccatgtcccctttttaacattactacaggacacttaaataaaattttttaaacttgatttatattgctccagaagcagtaactctgattcttgggcaagacttaccaagagacagaaaacaagcttactgtttgaaagaacttatcagcagcactcatttgtgagtatatataacaaacaatcttatttgaaaccaagaaaagattaagtgtgagggattattaagctttgtctaagttgagtgagcttattggctacagggttaaggaataacaaaagtaggcttcacggtatcttctttttgaggtggggaatcatacaaggcaaaggtagttagatagcatgacttccatgtgctggatgaagctacaattctgttttctttttgcaaagaaaatatggggctttaagaacacagttctggagcccacttccttctccaaaggaggcttgaaaaaaaatatcccagtagcctaattatccagcatcaagacagatactggggaacaattttgaatacaaataacctcacaaattaaccctgttagcagtcttcagagataccatttaaaccaatttctacaccaggactcagcaattacctctccccttaatttctgataccccaggtcaggctctagtgactatgggagaatggaatgaaggtaattgagaggaaaataaagactaatcttcttggattctcttccaccacatagttgttgcaagagggtaaatagagaaaagaggcaagatatctgtatctacagattctgccgggtgtatcaacctccaacataaaagttcaacttcctagcaaatgttaactctgaaataaaaacagtagttttatgtgatgggtgcttacatgaataattaagagttctgagttgatatctagaagttcttgttagctcagcgctattaagaacacttttcctacaatagaaattttctttggaagaggcaggagaggaaagagactgactctgggagtgaatgtgcagggtggggtcaccatgacacctgtaggtctctatactacctctcctcctcctcttgatgcagttctctaggctcagttttctctatcttacatccacctatgttccctttctgccttcttcctcctctactttgtagctcccacattttcagcttatatattagccaattagtatattagtaatattttgaagtcactgttcttacctaagtcagtttaacaatcagcataccagtcagttagtgatcaatgtgttaatcataaagtaattaaaattttataaataaccttacaatcaatatgtcaaactctgtcattgcttccagggccattggtgtgttaatacaacacttagtaaagtaagcaatgttagtgttggagtgggagtagaaccgtgttttttactacaatgagttagagccactaggtctgagagactagtaaaagaatgtaaacagtaaaaattttgtgctaagttttatgctaaagtctgggtgatgcaaaagagacatctggggtttagttagagagggcaaaataagagacaatatagaaatagatacaacaaaagggtgatggatataggaagaacgacacaggaaaacaataggatagggatgacgtacagctgcaccctatgtacctgagcagatggtgcagaaatgatcagtgctgcccagccaagcccagcctaaataagttgaaccatgcattagagtgaaaaataaatgtttaatgttgtcagccactgatgctatacagggctttgtgatgtgacaattctgtgataatagataaatgatacaataatttacataaaccctgtaaatattagtttattatagaactctataaactcttaataaaatatggataatagtaatactttgcattagttttctattgttatacataaattactgcaacttgagctgcttcaaacattattagtttattatatcacatttctataggtctgcactctcataggcttaactgagttctctgcttagggtatcataaggtcaaattcaaaatatcgggagggctgggctcttatccaaaggctctggggaagaattcgcttccacgttcattcagattgtagtcagagctcagtttctttttttttcttttttttttttttttttttgagatggagtctcgctctgtcacccagcctggagtgcagtggcacaatctcttgctccctgcaacctgtgcctcccgggttcaagcaattctcctgcctcagtttcccaagtagctggaactacaggcaactgcaaccacacctggctaatttttatattttttggtagggatggaatttcaccatgttggccaggctggtctggaactcctgacctcaggtgatccgcccgccttggcctcccaaagtgctgggattacaggcttgaatgagccattgcacccggctgtcagagttcagtttcctactgctgaactctgaagtccctgtttgtttttgtttttgttttttgtttgtttgtttgcaggctgttagctaggatgcccgttctgtacctaggggcttcttgcattccttcttttgtgacctccttatatttcaaaccagcaactgacccatgaacctttctcaaattttgaatatgtctggcttcctattctcctactacttggtgaaaactctgcttttaggggctcatggaattagactaggttcccctgagtaatttccttttcaattaactcaaagtcaatagatcagcaactttaattacatctgtataaccccaagcatgatattgtatcatattcacagtcctagaaattaggataggaaatcttgtggtagaaaggtttttaaaattatgcctatcacaccatttaaaaaatagctagtgagagaggagactttcttttccaatatatgtgttagttttaaagtatgtgtgaaataatttttattcttaacatttttttgatgaagcacaatgtctgaaagggtggtagaaagcagctggagtcgaaactgaggatgaagtcgtatagtctagagctgtgctgtccaaaacagtagcatctggttagcttgagtcagaattttctgtaagtgtaaacactcgattttgaagaatttgtaccaaaaaaaaatcgtgggaactatctcatatatgatttttatgctgattatctattaaaatgataatatttttgatatagtagcttaaataagacatactaatattaattttaccacttttctttttactccttttaatgtgactaccagaacatttaacatcacatatttagctctaattatatttccaccacatagtgctggtctagagagctgttttgtttgtttgtttctcctcaggtatccaccatgtcacccaccattactgctgccccttttctcctcactggctttccaggtctggagagatttcatccttggagttctatctccttctttatcatctatgtctctacagtccttggcaatggcagcctcctcctctttatcagagaagactgcactcttcatgagcccgtgtactactctctgactatactggcagccatagaccttggtgtaactttgacaacaatgtccactgtccttggtgttctctggctagatcacaggaaaatgagccatggagcctgcttcctccaggcctatctaatccactccctctctatcgtggagtccagagtgttgctcatcatggcccatgactgttttattggcatccataatcccctgagatacacctccattctcaccaatgctaaggtggtgaagatagatctgggggttcaaatgaggggatttgttatgctaattgtgcccataatcatcaccctctctggattcccctactgtcaatcccatgtcctctcccatgctttctgcctgcaccagatgtgatcaaactggcctgtgcagacatcacctttaatagactttatcctatagtcctggtctcatcaactggtttcttggactttgtgcttatccttatctcttacattctgatccttaagaaggtcatgggaattgcctcagacaaggagcagactaaggccctaaatacttgtatttctcacattagctgtgttctggtttttaatgtcacttgattgggctaccaccctttcagacactgtgcttcatcaaaaaaatgttaagaataaaaattatttcacacatactttaaaactaacacgtcacaatgcaaatcaaaaccacaaagagataccatctcacaccagttagaatggcaatcattaaaaagtcagggaacaacaggtgctggagaggatgtggagaaataggaacacttttacactcttggtgggactgtaaactagttcaaccattgtggaagtcagtgtggcgattcctcagggatctagaactagaaataccatttgacccagccatcccattactgggtatatacccaacggattataaatcatgctgctataaagacacatgcacacgtatgtttactgtggcactattcacaatagcaaagacttggaaccaacccaaatgtccaacaatgatagactgaattaagaaaatgtggcacatatacaccatggaatactatgcagccataaaaaatgaagagttcatgtcatttgtagggacatggatgaaactggaaaccatcattctcagcaaactatcgcaaggacaaaaaaccaagcactgcatgttctcactcataggtgggaattgaacaatgagaacacatggacacaggaaggggaacaacacactccggggactgttgtgaggtggggggaagggggagagagagcattaggagatatacctaatgctaagtgacaagttaatgggtgcagcacaccaacatggcacatgtatacatatgtaacaaacctgcacattgtgcacatgtaccctaaaacttaaagtataataataataataataaaaatacattattttggattaacaaaaaccaacaggctaccacagattctctttgtgttcaattttctcacatgttttgttattctggctctgctagaattctcttgatttgagtttgtcatattttctctttccccatagcctgtgtattttttcttcctttataaactgtaccccacttatacaaacactatatttgttaccttccttgtttttcaattattagcttaaataatatttcttttgagaaattttcccctgccccaaagatgctttctgtgggctccctttagcatgctaccatctatgcagtaatgatagtgctatgaaaatttgtggtaactattttctttatattacacactatttacattctgtgaataaagactatgctcctcattgtgtatctggcaaaaaaaaaaaaaaagggcaatgagctacaagtaatataattttaagataaaaagctgaatgtcagccgggcgcagtgactcacacctgcaatcccagcactttgggaggccaaggagggtggatcacgaggtcaagagatcgagaccatcctggccaatatggtgaaaccccgtgtctactaaaaatacaaaaattagctgggtgtggtgacgcgctactgtagtcccagcttctcaggaggctgtggcaggagaatcacttgaacctgggaggtggagtttgcagtgagctgagattgtgctactgcactccagcctggcgacagagtgagactctatctaaaaaaaaaaaaaaaaaaaaaaaaaaaagctgaatgtcatgaatctgcatgactattaacagatccattgaagttccagtagataagaacaaattttaccaaagtaacaggaaagacaaaaacgcaattggaattcataagctctaggacccgtagaggtacatatgatccctgaagacaaccgatatcccctaaccctttcaaataaactaagttatgatgctgagcctccttgggtcacataaccaagccctggtatccctatcttacatcagctggtttttgaatttcaaattttcctcaccccattcttcaggaaacacctgaaaatcccgaggacatcagttgtggggccctgttcctcccgaacagagaagagagggaagggagatcaaggggtctcctgagatgctagaaagatgaaactcaggggaggtgatttccacatgcataagctttaaaatgaggcctcatgagaggtctgtgagtgaatgatctgaactgagtcctcaaagaggacaggaataggttcctattttagccacaatactgtgagtgggtgagtgccaggaacttgaatatggaatgattcctctctcttctgatgtgagatgcactcaaggaaagcatataagaaggttttccagaggtctgcctagaggtaaagatcacagctgaggtgggatatcctacagcacagatttttttttttcttttttgaaagagtatttaaggaactgtgatagatttaggttttctaatctgggacccttggattggcataagtataattgttaatgctcagaactgcatgtgtcattgtgcattcttactcatttttctatgtagatgtttatagcttttttttcagagaatatttcttcattccaaaacagctttgttatcactcacctcctttgttcagttattggtaaatatattacatttatatttgtaatagttccagcaatgcaattctattttttattgtaatacattcatttttgaaaataagaagcagaaaggaatatgtatgcataatgtcttctataatgacatgactatctttactggtgcttttgtcattttatgtagattcaaatgatcatctttggtcatttggtttcaacttagttgaaatcaactcagtttttgtttatccagaaagggcttattttacgtttattttttattgataactttcctgttcagaggattttttgttgatagtttttctctgaagagtagacaaaaaattctgaatcgagttgaaaggcttagaaaagggcagccaaattaagatctaagaaagcaaattggattgaaaatgaaatcatattgatggcagatgataatatattggactgggttggagaaggcaggaggaatttaacttgtggacaatagaaatctgagagttgggtagtcccaactgtcaggccctcaggactggggccaaatggaggactcacttttttgaagattaaagacaatgcgtgagagcacggagttctgaacctaaacaggctgagcttctgcactctgctaagatcctgaaatttatagaaagaaaagtcaccattttaacatataacaatttaatttataagatccaaacaacaccccttgaaacacacacatgcatgtgtgtctgtgtgtttgtttgaagaactgctctaagagatggcatgagtagtcagtgggactcactagaaaaattctagagacagggcccatctccttaggaaggtgcggggacacatcttccatccaactcagaaggagggcagagtaggaaatgagaagatgagggaaaggaggaatcatattttttcctctttcacttgtttatgtagactgtataatagattcactatttactacattttcttgaggctaacagatctttcctgtctgttccttcttcatactacaaagttccctctgtctcctttactcccttgtatctggtaacattcaaattatgttctcaaagtgagcatgacaacttttttccatggacctgtatgtatttatgcatcttggtgagagtgttgctacaagtataggaatcttattcatctagaaatatatcatcatgtgaaattcaggtcaatagaacatctagaatgaagctagaatgaagcagggcttagatctatgatttttctcaagttttcagcattatggatcctgttgagacattcaagggcaatattctgcataaaattgaagggagaatattaagcactattataaactcataggccatattgagagcttcttaagagcagactgtgcttattacatggttatttagaactaaacacagtgcagttgtgtggcatgtgctcaccaattctgtgctgactcaaaatagtcattttccaacttgtcccagatggtattggtgaatggagctcctacaggttgcttatatcttcatatatgatatatcagttcaaggaaaaatcatcacacatcaagtcaggaccccagatccttaggaaatcactaaacatttatgttctgagttgagagctgcctatcaatttcacagccatagctgctccacctttatccagaaaaactagttcttgtgcttctagtataattttcttaacacttgttaatagctaagccatctgaatggaattttgccacatagtgcagccttgggagcatgcatacagtatggcttcatctctggtgacactgcttatagtgggcctcagtttgatgacagtatctagctctcctagaatccccacacgcctgcctctgggtaaatatcaacggcttcccagtgttgggcaggcttcttttgtgtttctttttattcccaaaatctcagacatgatttacctttcattttctttgaggtaccataaccttccctgtcttacttttaatgacccaagcttagagatggagggagatatgactgtaaacatttttttctgctcataaatataataaaaaactttcttttttggtttcaagtgttttatggccaatttctctaaagacgttattgttttttaaggaaaagctcacaaacattttaaaaagtacttgtgctctggaaatctagtttgatccttacacaattttttttaaaggaatcccagattttatggctttctttttaaaaattttttatttttaaaattttttaaaactttaattaaaaaaaattttaatgtgactttcttctatgtttacccttcagaatatgtgtcaccaatttgtcctttctctaatctgccattctcttcctcctatacctcattccgtacatcctcttattcctcaatctgtgtttttaagcatgaaggatctttcgaaggtagaacaacatttgtgtaataattataattcagtcttctatatgaattcaatgtgatttaattttagggattccctagtgttggtgatttcaatctcagtaagttagtaatcctgactcacaggagctgatacagaggtagcatcagaacatttccttatacaatatgaaatgctttgtgatttcttctgattctgatttatttttgatactgaggccattttatgaagaaaactgctaggtgctaaagacttgcctccaggattctgaatttctcgttaaataagactgcagcagagctggtaataagcttcttctttctcccatacccctcttggatcgtggcaaccaagaaaacagaaacagtagtgatggctggcatccttaggctgtggaaacattataattttacctgttacagaactgcaacagttcctcaggagtttggagttgatggaaaagcagagagaggtaagaaggacagaaaaccagctaagtatttaattatgggaaataatgttggaaagggcaagtggcagaaagaaagccagtaaatggtgaaagaaacataaaaaagataattgtatgaagatatttggagaaaatgagaaaatcaactggatggaagcattaaaaggtttctatctcgaaagatggattaggtatgaaatgcttatagcagtgatgcccagacattgttttgcactggaatcacctgaggacctgaaaaaagcgaatttgattcagaatgttggaaggggcagaatctgaggctgcatgcctaacaagcccgctgcttgttagctgcgtctagtctgtgatccacaactctggtggccaagctcaagtaactgttagagtgacaaagccgttcattggtagtgatggtgatgcacgctatagtgcataaaacactgacattcaatttccaaaaaaaatgagaaaaactgcattaactgaaaaaactgtcttcatcataatcgtgaaatgtaaaattacaacaatcatttccaaatggtcagtaatcacagcaagaagacaactaagccagattattatccatttatgtatatttatgttatgtgtttttgttatcactgttgttgcaaatatttataagtaccctcaaaatagttgcggataatatatttaaaattaatgaaaaatttttgaatttgagaaaaatcgaaccattaactcagtattttttctaattagggaaaaaaccatagtctgtacatgctattcttcttcaggaaaatagttgcagagtcaaatttatcacaccagttaatcatctccaagcaggaagattggaggctcctggtttcaaggtttcaagaaatctgatctttaccggtggatacactatgtggcccaatattactgcagccccttttttgctgactggctttccagggctggaggcagctcatcactggatctccatccccttctttgctgtttatgtgtgcatccttctgggcaatggcatgctcctctacctcatcaagcatgaccacagtcttcatgagcccatgtactacttcctcaccatgctggcaggcacagacctcatggtgacattgaccacgatgcctactgtaatgggcatcctatgggtgaatcacagggagattagcagtgtgggctgcttcctacaggcttactttattcactccctttctgttgtggaatcaggttccctcctggcaatggcatatgattgtttcattgccatccgcaatcctttgagatatgcttccattctcaccaatactagagtcatagcgttaggagtgggagtgtttctaaggggttttgtatccatcctgcctgtaattttgcgtcttttttcattttcatattgcaaatctcatgttatcacacgtgctttctgcctccaccaagaaatcatgagactggcttgtgctgacataactttcaatagactttaccctgtaattttgatctctttaacaatcttcctagactgtctgatcatcctcttctcctatattctaattcttaatactgtcataggcattgcttctggtgaagagagagccaaagccctcaatacctgtatctcccacattagttgtgttcttatcttctatgttacagtgatgggtttgacattcatttacagatttgggaagaatgtgccagaggttgtccacattatcatgagttacatctacttcctctttcctcctttaatgaaccctgtcatctacagcatcaaaaccaagcaaatacaatatggcattatccgccttttatctaaacataggtttagtagttaaactcggatctggagaatcagacacagacataaaaatgaagccagaatgaaaaatgaaagcctggagttctttcttagcaaagagcaagggtatactggaagacaatgttgtcactcacaaggacttaagtactttaccatagggttgggggcatatcttaggagaagtctggtgacagaacactgaatagaccatatggaactgaaaaagtctatatttaaattcttctttcaaatgcacctgaaattagccacctcagtgaaatttgaggaaaaggcagaacatataatctctatgaaaaacttttgcctcagtgtgcacatttgtgcatacatgtttatgtgtttgcataggctaatgcacacaagtgtaaaaaaaaaagttgatcatcattctctagaaataaattcttatttaaaattttcattattctcatggcaaatatagtgataagaaactaacattttaaatttacttttaaataagtaagtgttggttatcttttaactgtcctctaccctgagttagggtactctctagggccatgatttgcatttaatattttctaaatacagtcgtaagtcacttacagagtatttcaataagagctttttaattttcaatacattccttgcaggatgtctggattttataaaagtgtatttctttacctcattcttctataaatattcttttgcccaaaaaaatcttagaaggaaaaacctagacaagcttcttgtcagctcgtaaaaaagtaaaaagtgagtttttaagagtatgtttgctcttcagatgattttaacatacttttcccttggcctaataataggaagggtcaaggctctattcaaaaatagaaaatatagccattctagaatgaaaaatatgagacatcattacttcacaagttatatatactttatatatgttcagagggaaaaattagaaatggtgattcttttgccataaatactttctctgacatctactgtaaactctctatattaggaagaccaacaatgttgagagaaatggatttcaattcatccaatgactaaaaaattgtggtgggaggagtttttgtgtgactgtgtactaaaagcttcttttagactgatttaattgtgaaacaggattttcatccacaaatttcaaaaggggaaaacctatctcagagtataatgttcaagttattgatgctgaatataaactcaaatcctaaaagtcagttatctaccaaagactttctctgttccttatatgtgaccatgaggtctataatacatctaggcatcttaatggaaaaatctcatttcggataattcccatcttgatttgctatcttgatgcagaacctcttgtagctgaggaaagcctgcctttgtttcccatctttgtagaacagaagctgtgggacatcacaagttgctgtggtaatcacaagttactgcgatattatatccccatctgatatctaaattttgaggataggctatctgttttacagtgatacatttgatggaaggactcttagtttaactggccaaggccaggacttcaagccatagtttaattacctgccacatgtgtgagaaataaggaagtttcaaaccatgatggagcagcatcactggcatgccttttgtgtatatggtgggttgaggatatggcaatattgcagcctcactgaataggtataaggaggtgcttactttggataagcagtgttgtttccaagatgaaagaagcccaaattattgggaaatatgtttattattaatgacgttgtccttaaactggtttagacgttgaattctctgttcttggtgccttcatggttgtttaaagaaaatatttttcaaattgattctaagagggtgatctgaatccactagcattttatttcattgagacttttcatcttttacatagaaggaaactaagttattagtgctctgaaatatcaactttcatgataaaagatacacagtcccttctgagggcacaagccaatacttcattaaaccaaaccagctatcactcttctgtcatatttttaataaggaggacagcttcctttaaattctctaaaaacaaaataatatccttattcagccttcccactttaccacatgacctgattaacctattaatgacactgtactatgtcaattatgatatcctgtctttacctatatgttaatgaaactgttagaaaagaaaatgatatgagtaattttctccagggtatcctttgtgcaaagcacttcattgaaactgattctcttcatcttttctacaaagtcagcatgtaaaacactcattaatgtacaatgaccaatcaataaataactgttgattagtgaataaagtcattatcttcttgtgataactatggaagtcaatggaactactctccattcagcaaaactcagaaattcaggtggcattacttacgcttctttctctttaatctactaccttcaatcactcagttctattctaagtcatagaatctctcttctattcaagcctttctaatgctactgataacaactagtcaaaaccacaccaacacaatttgacacgtgtattgtcatatcctgatacttcttttacctgttctcccccttttccaacatgtttctcatactgtagccatagtaactttaaacaataactacttgattataagtactcatcatacctcttgttttatattcattcccttatggtaatgtcaaaatgttttacatgatttgcaagatatattgtgatcagaacctgctactactacagattcattttctctcaagctttttttcatgtattgttgttcaagagatattatacttccttaatgtatattttgaataaaattatttttatttgaatttatagtatttaatcttgccccattaccaatgtacattttacaaactttaatttgtttacttgtttcgttttgtgtttgttcttttcacctgtacgcaatgattgcactaccccaccaaatactactacactactaatatagtagcatttaattctcagcttaagtagcatttcttctggaaaatgttccctgatcccagaaatttatttgatgtgtctctcatagcacactaatattcacgtagtaatgatagtgttgtatgaattcatggtaaatattttctttctagtgcctgcttgggttttaaatttcaataaaaagaacaagtcctaggtatttcattttctttgtggctgttcttaatgggattgtgttctcgatttgactctcagcctgggccttattggtgtatggaaatgctactgatttttgtatgtgattttgtatcctgaaaccttgctaaaattgtttatcagttctagcagccttttggaagaatctgtaggattttctaagtatagagtcatatcatcagcaaagagagatagtttggcttattgtcctattttgatgccatttctttctttctctcgcctgattgccctggttaggacttccaattttatgttcactaggagtggtgagaatgggaatccttgtcttgttgcagttttcgaggagaatagttccagcttttgcccattcagtatggttttggttatgggtttttcatacgtggcttttattcttttgaggtatgttcctttgatgcctagtctgttggaggtttttatcatgaagggatgttgaattttattgaaaggtttttctcagtctattgagatgatcatatggtttgtgggaggtgaaagatctctacaaggagaactacaaaacactgctgaaagaaatcagaaacaacacaaataaataaataaaagctttccaggctcatggattggaagaatcaatatgaatttaaatggccatactgctcaaagcaatttagacattcattgcaatttctatccaattaccaatgtcattcttcacagtattagaaaaactagtttaaaattcatatggaaccaaaaagagcctgaacaggcaaagcaatcttaagcagaaagaacaaaattggaagcaccacaccacctgacttgaaactacaggccaggcacggtggctcacgcctgtaactctagcactttagggggctgaggtgggtgtatcacctgaggtcaggagttcaagaccagcctggtcaacatggtgaaacactgtctctactaaaaatacaaaattagccggctgtggtggtgggggctgtaatcccagctactcggaaggctgaggcaggagaattgcttgaactctggaggcagacggtgcagtgagccaagatcgcaccactgcactccagcctgggtgacagagtgaaactctgaaaaaataaaaaaagaaagaaaagaaagaaagagagggaagaaaggaaagaaactacattataaggccacagtaccccaaacagcatgatattgttacaaaaatagacacattgactaaggaaacacaatagaaaactcaaaaataaagctacatagttacaaccatctgatcttcaacaacactgacaaaaacaagcagcgggaaaaggactacctatccaataaactgtgctggaatacgtggctagccatatgcagaagaatgaaactagacccttaccttacaccatttagagaaatcaactgaaaatgaattcaaaacttaaatgtaagatctcaaatcttacctgcactggcagtgcatttttggctaagcccccaaaagcaattgcaatgcaaagaaaaattcacaagtggaacctaattaaactaaagagcttcactattcacaataacaaagacttggaaccaacccaaatgtccaacaatgatagaatggattaagaaaatgtggcacatatacaccatggaatactatgcagccataaaaaatgatgagttcatgtcctttgtagggacatggatgaagctggaaaccatcattctcagcaaactatcacaaggacaaaaaaccaaataccacatgttctcacttataggtgggaattgaacaatgagaacacttggacagaggaaggggaacatcacacaccagggcctgttgtggggtgggggtggggggtggagagggatagcattaggagatatacctaatgtaaatgatgagttaatgggtgcagcacaccaacatggcacatgtatacatatgtaacaaacctgcacgttgcgcacatgtaccctagaacttaaagtataataataataataaaaagagcttctgtgcagcagaagaaactatcaacagagtaaactgacaatctacaggataggagaaactattcacaaactgtgcatctggaaaaggtctaatattcagaatctataaggaattcgaacatatcagcaagcaaaaagcaaacaattccatttaaaaatgggcaaaatccacgaacagactcttctcaagagaagacatacaggcagccaacaaatatatacaaaaatgatcatcatcactaatgagagaaatgcaaatcaaaaccacaagagatactatctcataccagtcagaatagctatttttaaaaagccaaaaaacagattctcatgaggctatggagaaaagggaacacttatacaatgatgatggggatgtaaattagttcaaccactgcagaaaacagtttggagagtcttcaaagaactttaagcagagctacaatttgacacagcaatcccgctactgggtatatatccataggaaaacagagcattagaccaactagacacatgcacttgcatgttcactgtaatgctgtttagaatagcaaatacaaataactggcctaggtgtctatcaaaggcggacgggataaagaaactgtggtacatatacaccaccactatgtggcaataagaacaaatgaaatcatgtccttttcagcaacatgggtggagctggaggctataatcctaagcaaattaacgcaagaacacaaaagcaaataccatatattctcatttataagtggaagctaaacattgagtacacgtggatataaacatgggaacaatagccacttgaaactactacaaggggcagggagagatgcgggagagggttaaaaaatctattggatagtatgctcaccactgcatgcaatatatccatgtaaaaaacctgcacaagtacccactgtatctaaagtaaatgttgaaaatttaaaagaaaaaacaaataaataaaaacaagtctatcctgaacctggtatgaaatgggcagtgatttttatataaacaaagttattttaagacaaaatataataggcccttcatttacttggctattaatagatccattgaggttcctgtggatcagaactgattttcccaaagtatcagaaaagacaacaatgcaattgaaatgcataaactccaggacaaagacacatgtgaccctgcattcaactagtatctctcaatactttgcattgtattgagacagacaatgcaaagtacacacatggatatactgtgtactgatgcttagggtcctgaagggtcacataattaagtcctggcatcccaatgtagaggtggcattggagtatgcagcttttctcatccatccttggagaaatacctgaaagttccgaggacattggttgagcgtccctgcttctcccagacagaggagggaggggagatcaagggttcttctgagtatttggaaagaggaaactctggggaagtgatttccacatacataaactctctaatttggcctcttgaatagtctttgagaagtgagtgtctgaactgagtcttcaaatagagcaggaatgggtccttattccagcaagaaaatgacagcataggtgagtgccaggaacaggaataaggaatgattcctcttccttcttatgttagatgcagcgaagagaagataggaagattttcagaggtctgcataggagaacatactccatctgggatgaccaacacctaaagcacagactttttcatctcaacacatgtttcaaggcaggcttgaagtttcaaatgtggtgctcatggattagcttcaggaaaacgtgtgaatatttttagactaaatgtgacgtcacctgcttttgtccatttttctccacagagggctcatggcttttgttagaattccataaaacattaacattctatttcaaaactaaacaaagaaaagttttctaacaaaacactatgtctatatcatgattgtgaaacataaaataaaaatcaagtttaaatgtatccaaatatgcaattaagctaagcagcaggttaactatgtacaattattatctaattgcatatatttgccttcttttttgttactattggttcaaacattgtgcagcaagcacaccacagaggggcatgatgcattttttaaaatgtgttttttagattaagaatgcttaactacttaattattcataactgaagaaatgatcatcattccttatctctagcacagtctataaatgtattgctcttctataagaaaattgttgcacattcatgcatataccaataaattattgctaaatatgaatattaggattgaggctgcagaaatacagtttcacaagaaggtagtaaaaactgataaggcagggatttcagtgtaatagtttctataaagctacttgccacttgtgaacacacaatgcggctccttttttgctgcctggcttttcagtactggaggcaacttatcactcgatctccatccccttctttgctgtttatgtgtgcgtccttcttggcaatggcaagctcctctacctcatcaagcatgaccacagtcttcacgaacccatgtactgtttccttgccacactgaggcaagacctcatggtgaaattgaccatgatgcccactgtaatgggcgtcttgtggatgaatcacaaagaggttatccatggggcctgcttcttgcaggtttacattatccactcccattatccacttgcagaatcaggtattctcctgtcaatggcctatgaccgtttcattatcatccacatgcttctcaggtataactatttctactaaatcttgggtgaagatagaactgtggctatttatgagggactttttatccctcgtgcctccaattctgccactccattgcttcccatattgtcattcccatgttctcttccacaccttttttctccatcaagatgtcctgaaacttgcctgtgctgatattacattcaatcacttatacccagctattctggttgctttgattttcttcctagacgctctgatcattgtcttttcttatatcctgatccttaaaacagttaaaggtattgcctccagaaaagagcaagccaaagctctcaacatgtgtgtctcccatatcagctgtgtcttggtatttcacatcaccgtgatcagtgagactttcattcacaggtttgggaaacatgcaccacatgtggtgcacattaccgtgagctaatgactcatttctttttcctccattcatgaaccctattatatacagcatcaaaccaagcagatccaaagaagcattgttcgcctattttctgggcacagaatggcttgagcccttttttcagaattttgtgatcttcatgatttctgggccttttgagtaattggaaaggagcttattttatacccaatatctcttgtatcagtgttagataggctttaactattatctaaagtgaaaagctacatggaacaataatacaatgaatgtatccatcaattgatcaattgataaatacataaatatatgtataaatgtattcatatgtagatgtaaagctttatcgagggagatatatctataatttacctatctattgagagatactaggaaagtggaatactattgaatatggagataaaacatgtagataaataccctaataatcagggaaaatatggttattcataacctgtattcataagaactgaaagtaccattttaggaagagtcaagtggccagtctagttcaaccaaagcctacagaaggaaaaatgtgcaattgcagatctagttttggccatataaagatgaattatagcatgtgaattgaggtcatggaactctactataatctcaaaactactctatttcagggtagattttccttttttttttttttttttaaaatagattttattttccttcaacttattaggtaggtgcaaaggtaattgcagttcacagaaattacttttgtaccaacataatatattttaagttccagggcacatgtgcaggatgtgcaggtttattacataggtaaatgtgtgccatgcaggtttgctgcattcgttagctattcttcctggtgctctccctctcctccccacccactaccggacaggcccctgtgtgtgttgttccccacaagtgtccatgtgttctcactgttcagctcccatttctgtgtgagaacatgtgtgtttggttttctgttcctgtgttagtttgatgaggataatggcttccagctccattcatgtccctgcaaggaacacaatccttttcctttttatggctgtatagtattccatggtatatatgtaccacgttttctttatccactctatcattgatggacatttgggttgattccacatcttggctattatgaataatgctgcaatgaacataagcatgcctgtatttttataatagattgatttatattcctttgggtatatacccagtaatgagattgctgagtcaagtggtatttctgcttctacatctttgaggaaaggctacactctcttccacaatgtttgaactaatttactctcccgttaacagtgtaaaagcattccattcctttctctctgcaaccttgccagcaactgttgtttcttgactttttaataattgccattctgactggtgtgagatggtatcccattgtggttttgatttgcatttttctaatgaccagtaaggttgagctttttttttttcatatgtttattagaagcatgaatgtcttctttagagaagtgtctattcatgtcattccccactttttaatggggttgtttttttcttgtaaatttgttttagttcctcatagactccagatattagacttttgtcagatggagaaattgcaaaaattttcttctattctgtaggttgtctgttatctctgatgatagtttcttttgctgtgcagaagctctttaatttaattagatcccatttgtcaatttttttttgcagttgcttttggtgtcttgagttttctttcaaaatgatacaatgtcatctataaagttttacagtagagactctctaaattcataaatttcctagttgctcatttcatgagttaatgtatttcttttgatcttgtgttctctctaaatgctggatagaaacatttctgatatgtccaatagatgaaatataatctgatattttcctttttgtatattcaatttattttttattctaataaatcacaagtgatctcaatttgttgcagcaacttggaaatctcactaggatttatttgatcatatattttgctaattttcatccttttataattgattttaagaagtttattatgtattatctctagtgttttatttttagtgtacgtattttcccagttttctgtttgtcttgctatatacacaatttaaaagcttacatatacattattttattatttactttatctactgaagtattggagccatactatcaaagcccttgctgacttcaggtttatttatatctttttcttatacttttgcctaatttatttgtacatatcctatgtttaaaagggtttgtgtttggaggagagtaggactttaaatcattcctcatgtgcctattttcgtggaaacaccactaatatttaatcattcctttggttaattttttaagggcactattatgggtcaccttgctaagcaaaaatgatataagagagcaaatagacaaacttttcttcttaaagtcttcaaataagtggggactcaaagaataaaagaaatccaaatttaaaacaagtgctgtgattaatcataaagcagaaagaagacactgaatggagagtgtgggtctcaaaaaaggcttgaggttatggcttgaaataagggtaagattccctgagaaagtgtcccttcagctgagacctgaaaatggattagaaactaactggtgaaaatacagacaagaatattctaagactgaaggagtgtgtgtggagacctcagctaggttggtttatattagggaaggtggctactggaagagggtgtttgctttgagaagaggctgaagagggaaggaatggccttattggtcatcataagagtttgagtctctactcggagtcatggaaagctactgaaagaagctgcataattcattgatgttttaaaattacttcaatattatttataaaatggaattgagggaggcagggaaagggcagaatattagagtaatttgaagaaagataatagtaactcaatttaggaaagtggaaatggtaatggagagatatgacaaatatttaaggtctaaatataataaggtttacaggttatttagaaaagcagaggaaagaaagagttggaaaggagcaaaaatcaccatcaatttctgacatgttcttggaagaaaggcagtgccaaaagaaaggcagtcactgattatgtattgtctataaataagaagaatcattataatttttaaagttgtgggacactgagaatgagtcaaaataataaacatgtgatttaagaaagcaattgaaggaagtatttcaaactgtagaactagacttttaaaaacaaaatattagcttaataattaaaaaaatcattcattcaaatcatttcagtatgtatttctttttgcctgatcatgaagagtcatagtaaaggcaagacatatgtcagaaaatgatgagaatttacagatgcaagacaacagaaacaaactgaagcagatgacacccaaagaaggtcagagaataagtgaaacagtggctcactatcctaggagaaagcaggatagatccgggtttttcttgggtgtcattcactgaagtagacccagttttaaaatagcagtccaaaaaatactgccaaacgtgagataatatatcaattatatgatacaactggttagagccagataatctgatacaaacataaataggaagatggattaactaaattctgaattaccagatgagtaaataacaagaatttattgaaaaatgaagttttttcatgagtgcttatgttagttaccctagatttgcggcatgccttcacagatgtccaatcatagatatttgaggaggaccatatggaactgaaaataatctatgcttgattctttctctcaagtgaaattgttgagtcaaccatcctattctatttattaaaatcaaataaatggtctttaagatataagagactttatcctagtatgtatatatatagttgtgtttgcatgtgtgtgtggacacctgcacatgtggaataaatcttttaatattttatcttagacataatttttaacctcaaactcttgtttttaaacctttcacaataaatttaatgaattgaaatacatttattgttttatttttatagtggtaatatatacaatttgccactttagcctttttataatgtataatgcagtggcacttattacatttgccatgttgtgcaatcaccaccactatttctaaaattttgtattacaccaaataaaaactctatattgattaatcagttactccccaatccatgttcttcctacactctggtaacttctaatctactttttgtctctatgaatttgcctattctagatagctcatgtaagtgaaatcagacaatgttcttttgcgtatgacttattgcacttaggatagttttttaaggtttattcatgttgtagcatgtgtcagacctactttttatagataaataatattctatcacatatataagacattttgttgatatacgcatctgttgatagatacttgtattgtttctattccttggctactgtgaattattgatgtcttcccttcaatatgcccagattctacctaaatatatctctctacttcctctcactctgaatattctgcttttcaaagaatattccttggaatattccatggaagaagaaaatgagacaagctttctggagaaaggaagttttcagtgccttgatctcggctgactgcaacctctgcctcctgggttcagttttcagttaaagaaatgatttaacaaattttttcactcaactagagattttatgataatgcaatacagataaaagataatgcaatccttccagacctaaaaatatgtggcatccacattttacaggtacattttcacggagaaagataagaactggtgatttgtttgcaacaaatctttgctctggacttcactgagtaaagttttttttgctttgttttgttttgtttttgagatggagtctcgctctgtcgcccaggctggagtgcagtggcgtgatctcagctcactgcaagctctgcctcccgggttcacgccattctcctgcctcagcctcccgagtagctgggactacaggcgcccgccaccacgccaggcaaatttttttgtctttttagtagagacggggtttcactgtgttagccaggatggtctcgatctcccgacctcgtgatccacccgcctcggcctcccaaagtgctgggattacaggcgtgagccaccgcgcccggcctgagtaaagttttatattgggaagacataaaaatgtggagagaaatgagatccaatctatggaatgcttaaaaaaataggtgtaggcgcaagttttctgtatgtccttgtattaaaactttttcatactgaatcaattgtaaaaccgattatttacccaatgcatgctgtaagcaaaattatatgctattgagtacaatgtttaagctattgatactgagtataaacacaaatcttaaaatctggttatcccccaaagactcctctgtttctcataatgtgcccagtaagttcctaatgtttattagtgtgttggtaggaaatttcaaccccgatcatttccatcttgatttgctgacctgggtgcaggttcttatgacagaggaaagactgtctttgtaagttattttggaagaatagaaactgtgaaaaatatatggcttctttggtgctcatgaggtattttgatactgcatgctgctccaatatctaaattatacatctgctcctcttttacagctttatcttaggtggaagggacttcagctaagttggctaaggcccttcaaattaaaactctgttagtttttctcatgcttagtgagaaagatgccaactttctgctatgaaacttcaagttatagttttttcaataacctgcaatttacgtccaagaagaaaggaagattcaatctatcttcagtgatgaccagcatcactgaacggttatctgggcctgttgtggattgtgaatatgacaatatttgaatctctctgacgaggtataagagagggacactcacttttgaatatgcagggctgtttccatgatggaggaaagagattggaggaatgtagatttatgggtgaagttgtttggcttggaagttggatggtcagttccaggtgctaccattggtgctgaaggagaacgtttccaaaatgtctttggggaaatacaatttcctatcgttttgtttagttgacacaaaatcttactcagcaggggcccaaagtgcaattggtctatattatcaactcctctatacatatttagacacttcgcaggtatcaagtcattaccaggagcaccagcttagttgtttcatcttctacaacctcattagattgactgactgtaacttctttcaacgtaatctccagaaaacaagttttactgcataccttcaaccttaaaatgtctcctttcagccttgtccctgtactattagtcctatttgccttgcatagatgtgagatggtacacagtgatttcacttataattttctttctcttcctatatggtaacataactgataagacacaaagaagataaaaaagacatataatgtctgatatattattgttggggtacagttctttattgagaataagagtttcttttcatgtattggtctagctatttagtagtatagatagatcacaggaaattgtagacttggtgtatttagacatcaacaaaaacattttcaaagtagtcttttcattggaatgggagaatataagttccataagtggttaaaacatcttaccttgagactcacttgcagccaaagtactaagaaggaaaaaaacacataaatgtctcttctcatgtggtcacagctatttgggaggctgaggtgtaaaaatcacttaagcctaaaagcttgaggctgcagtaaactatgatctcaccactgcactccctcctgggtgacagagcaagacactgtctcaaaagagaggaaagaaaagaaaagagaataaaaggaaaggaaaggaaagggagaaagaaaggaaggaaggaagaaaaagagagagagaaataaggaaagaaagaaaaaagaaaggaaggaatgagggaaggagggaaggagggaagggggaagggggaagggggagggagggagggaggaaggaaggaaacttcaaaaaatctttcttcttgatgttgttatggatttttctctgaaccatgattgatgtaaaaattagagacatcgaagtactaaacaataaagaaaaggagatagcattgtttggcatgcttgaactagtaatcttattacaaacagatgtagaggttgtaaaggtctacaatttggctacaaaaccaatggcttgatcacaagaatagcattcatttgcttaactagtacttactgagcacccactatatgttaagctccattttaagcactgaaaatgtcactcacttaaaatctttcagaagttttgttttactgtgagtacaaagagaactgactttatgatatggttatttaccaagccgtcacttcttagctacaagtctagaatcaacaggttctgcaaaatgaattctggaatgcatttattgctgtatgacctaaaatcacgttttggcaaaatcttacctgaatatatgagaggatatttaggtttttttcccctaagtataaacaggtgatagtaaatagagtaacttgctgcgagtgtcacatatattatgtagaatatgcattttatcactattttaaatctgaaagactgaatttgacatgttttgagataagagtttagggtagagttgtgtatctgcacgatcttagactacttaaatagaaactcagcacataatccaatgaaaaaagagatttcagaatgggactaatatgacaacatctggattattatgttcaataaggtggagcatcataggaaataaatcaggattaggaataattacatgataaacatttaaaggactgttgatattggttcacccatcaggaaagaagtcttagggtttttaatgcagatatctttatacatctagaaaaaaattatgtatgaatataatggctaatatatggttattttattctggagatcagacctaaatataaggagtagatattatatgtttcagagaagtatatgtctctctctctctctcactgtctctgtctgtgaatatatatatacacacacacatacacacctatgcatacatatattgatagtaaataccatatatacatatactaaataattaaatgaaacccacatatatatgaatgagatagctcagggtagggtagtgagttttgaatcaatagaaagaataaataaatgtctgatgaataatcatcaagacgaaaaggtttggtggtggctcaaggattttgtaaagggttgaattagagaatataatacagtttgaaaaggggcaatgttcttcaaatgttaacatttacaaagacaaagtgactggtcttcccactctaagaccaatggaacacttgagagtgactcatttcggtcatgcctcatctgatgttagagacacaacttctcttagagactctccttccaaagaaaaaataaaggccatggggaccagtttcaatggcccagatctttcccaggttggggaggaaaagagaattatttggtacactattcccaaatatcctatgtggaaatgagctagaataaccccttgagagttgtttgtgtaacaaatatatctctcatcagaattaagagtaaatactgaggatatagcaaacaaccaatattcaggtcatgctcagaaaccgcaaagagaaaactgtggctcaggtaagaaaagccaaggattcaaatacgggaagcaagtttaaccatttccatttgatggacattggttgagaatatgagcttgggttttgggttagataaacctgtgtttgaattcctttatgacacatattagttgcgtgatcttaggctaattgcttaacttgtctaaggctcaatttcctcaccataacaatataaataaaataatatattgtctttactttcttgttttttactcacttttcttttctctctctctctttaacagatttttctctgttgcccaggctagagtgcagtggtgcgatctcagctcactgcgacctcctccaccagggttcaggggattctcatgcctcagcctccagagtagctgggattatgatcatgtgccaccacacctggcttatttttgtaattatagtagtgatggtgttttgccatgttggcccagctggtctcgaactcctgaactcaagtgatccaccctcctcggcctcccaaagtgctgggattataggcatgagccaccgtgcccagctgttttttactcactttttgtctcacagtcattaggcattcatttctgccattatgttgaaattgtcaatattaccaaagacctagttgccccaaacaatcaacacctctatgtttatattaattgataattctatatttttcactattaacctaccatagtatccactcctataaacttcccttttcattgtttttttgtaaatacagatcaactttgctatcctcttacatctgtgcctgcttctttgtctatctcctttgagatctttctttttactgagagcaaaatttgtcctagtttcccaatgtttctctccaaaccttttttttttttttttttgagacagagccttgctttgtcgcccaggctgtagtgcagtggcacaatcttggctcactgcgacgacctctgctccccagtttttttaaagcaattctcctgcctcagcctcccgagtagctgggattacaggcgctcaccaccacacccagctaatttttgtatttttagtagagacagggtttcaccatgttggccaggctagtctcaaactgctgacctcgtgatccacctcagccttccaaagtgctaggattacaggcatgagcctctgtgcctggccacctcttccattttaatttgtacttaaggtaagatataaaaaagtcacttaaaagctgagatttttcagatattttgtcttcatctcatggcttcccattgtcagttgactttaaatatttattttggtatatttattaatttcttctataggaacacaattttggggcaatatgtggagatgaaaaagtggattcaggggacactgattgtacagggcacttgcagattatctggaactaaacggaagactgttcttttttaacacgatcttaatattctctttttgtcttctcattttagtttatgtctttataaatggtttcctgaacagttcctaagctttttgtcagcatggcaagttgaagaagctctggatgatggatctatgttaccttcagaaactcttgaggactctgggatagttgctgtcaaagaatcagtccaaaggcactcagaaaggggcaagagaacagtgagccagtcatttttgcatccctcagggggcctctatgcttgcctgagagtgataaattccactaaagttatgactctcacttttgtcatgtatcacattctaggagactccctaaactattagggcaactattctccctggaatatttgggtatgtggacagtttctggtactaccaaatttgccacaattaaatgccagcgtagctgttttgctagagactgcagatgttaaatagagggctatctttaggtcaataaaatatacttataaattgtattaactatttccccagtaattaccacacagttttaataaaaccctgtgcatccgcatgtcccaaacgcagctcaggttttgaaaacacgactatagtttaagaataatcaggcctcctccggcttcctccatctggtccattatctgggtgacagtagatccaaataagtggttagctcttatcctgtacaacaaattttggcattaatccattctcttataaggcaacattggaaggttaagagaacttataatgatatacacatcactcctgtggcggtagataagttctgccacattaagcactatgcaggtcataattcagtggatcaagttagttagcagtgtttttagtatccatatgaacatagtctctgctactgcagtgcctagactgacatttttgttatcaacagtgtcccctgaagtagcagccctttcaaaagtcctttcacctttcctctgtccatctctctccaccaataattgcttatattagagatgttactatgtgccaaaattctgaaacatataattattattgtttctataggtttttataaaataaaaaaggtgcaaagattgttatcacttcatttttactgaattacacttcaaaggtgtcggtagtaatatttataatattgaatgatattttaaaagactctggacacatacagaatcaattgaatttgggagaaactgagtttcccttgtagttctctttgttttcccaataaacctgctacaaaatttcttggtatcacaacaacaaaaatcttgactttgtaaaagtgtaattataaatataaataaatattaattataaatagacttcatagttccctatgaggatccttgtgaatttttctcaatacgagtcttacagattcataatgattagagggtctgtaagattgtctccatcagcaacatagttgccgtattttctctctgggagtgcttatcttttccctagaactggttgtgtgaagtttattaactcaattaccaacttccgatattactattgcccttcagatcaacatacttacgaatctatgactctaacaagtattaggcttttgtggaggccctcattgtagaagtatgtccttaaaatatttccgttatgagcttccaacatgagtctcctattttcatgtttgtccctaatgtgccaaaactcagactttttgcagcatagggaacttgctgagtcccaagtccactgagtaattacacctttctaaaatgagtttactaactttacccacttgttcaggtgttcagatttctgtggaaactcacaatagatgagttattttctttcgttttattttattttattttttatagagacagagtctgactccgttgcccaggctggagagcagtgctgcaatcatagctccctgcagcctcacagtcctgggctcaggtgatgtgtgcccctgtgcccagctaatttttatcttttcttttttttttggtggaggcagggtctagctatgttgcccaggctgggttctcttcttattcacagtccacttgagatagcaacattgatcacaatatttctcagtcatttctattgaataagcattttcctcagtggttaatcctaaatacagctgtcccattagtttcaagagaaaaaatttgaactgactcaacttggatagtaacacagtaagggcccatatgataaataataggaggaggaataaaagagtaaagagaataaaagggaacaaaggagtcctatttgggaccaagagtcaaggctatgagcacagacgtaagatgagtgttgaaaaaataaaggttgtatgcttcatagtgaattggaattattattctgaccatgatttttgttatttgttattctagggaaaggccttgtgagtacaggcttacaattaattaagtatgagacaatccagaaaaatatttaagttttgaggtaaaaaatggcctgatgatgtgctacaagaagattgtgagagaaaaaagaaaactgcatctttggaggtcatcacccctaaaaaatatcttctccacctgcaaaacctaccatgtggtataacaacagtgctggccccttcttgctgactggcttcttgggctcagaggcagttcactaccggatctctatgtccttctttgtcatctacttctccgtcctttttggaaatggcactcttcttgtcctcatttggaatgatcacagcctccatgagcccatgtactacttcctggctatgctggcagacacggaccttgggatgacattcactacaatgcccacagtcctgggtgtcctgctgctagaccagagggagattgcccatgctgcctgtttcacccaatccttcattcattcactggccattgtagaatcaggtatcttgcttgttttggcctatgactgtttcattgccatccgcacaccactgaggtacaactgcattcttaccaattcccgagtgatgaacataggactgggggtactgatgagaggttttatgtccattttgcccataattctttcactctactgctacccatattgtggttcccgtgccctcttgcacacattttgcctccatcaagatgtcataaaactcgcctgtgctgatatcacgtttaatcacatatatccaattattcagacttctttgactgtctttttagatgctctaatcatcatcttttcttatatactaatcctcaagacagtgatgggcattgcgtctggacaagaggaagctaaatctctcaacacttgtgtctcccatattagctgtgtcctagtatttcacatcactgtgatgggactgtcattcattcacaggtttgggaaacatgcacctcatgtggtccccattaccatgagctatgtccattttctctttcctccattcgtgaatcctatcatttatagcatcaagaccaagcagattcaaagaagcattattcgcctattttctgggcagagtagggcttgagcccttatttcagaatctcaagatctctaggatttctgggcctctcccattactgaaaaggaaccctggttttatatccacacttttttttcctcagagttagattcaattttaattatcacatgaaaaagctgatgtgagcgagaaatttttatacatatgtgtgtgtgtgtgtgtatatatatatatatatatatatcacctaataaagagggaatgccagtgatgctgaagaaaaagaatacaggaagcagaggagatataacaatccaaaagaagagtaactatgatttcagaaatagtcaagataagtggactaaagcagcttgggtcaaatacagttcatctaaagaaaaatgtgcagttggaggtacattttatgtgtcttataaaggtgaatttgaataatacatgatcatattttcatctccatactttgaaactagttactctgaaaaggatcttgcttgattagtaagcaaacttgtgtgaggctaaacagcaaatatctagaactttaggaagcttactcatgaaatgtaatttcccttagtagactggcatattttactactaaaaggcgtgtgatacagactaacagctaaatagcagcaaacacatttcttatcatctcgtggaagccagatatcccagccccgttttccttcttcccattgtctgctgaaactaacttaatactttttcttctttccagctttctattttgtctcctgacatttttcttctgaaaaaaataaccaactataaatttagatatcaccacccatttctatttcccctcttgcttctcacataaaaaatctcgagactttttcacttcatgaaatagttttgataattaatgcaaaaacttggcaaaggtaatgttatattttagaaatttttcactgatggaatagtttcttccttcaatcttcttcaaagtgtttgtaagtctttatgctgttcattgggtctgaaccgcagtctaccacttgctattagtgtaacaggggatgacaatttcttcatctactgctagttctgcgctagtatttgcagctgatctccttataggaaactaatctcaaaagttgcattcattcctctctgaagactgctgtttcttccaatttttaagttctcgttgagcttgcttctaatattttcttttctgattgaaagtccatgttcagaacccagtatataattattccattctaaattctctctgcttcacttaagaaatctttcatatttattttacatctggacagtgagcactctgaaaatattccagagatttgataagaaaatacttactgaaaactaaagctaaataatgcagtatttctccaaattagaaggcccatttggatgcaggaaaaataaaaactaataaatgactactcctgaaggattcagttattgtgcgaattgtttgtgagagttctttgaaagtaggacgtggggggtttattcattgtcattttagttgttattctctgtgtaaaatttatttatttgtttttccaaagttggcatacagagtttattctatttagaaacgtcgttttctggttgcctttgttgtttggtctaaaatgcacattgtgctaacatacaaactacatttaggaaagctgcatctctattgaccactgaaaggatgtctgtaagagtaaaaaacatagcggtattaaaattttcaggcgaataagggttttttgtaaaaatggcaaatgtatttgtcagtaggggattgcgatgctgttttcttgattgttataagaagacagcctacaacaatgtgtaaatgtgtaatgcaaacttaggggcgatgtgctgaaaataaggtatgatagcgaagtctaagaaacagaggtatctaattataaataagaagaagtgggaagatcaagttgagagctcaagtttactcatatgttagcaagggatgacataatatgatattatagcctattgatctttaaacagcctgtatcaatagtcaaaaatcaattaaaaaggataaattttaaaaatcactcattttcttaagtaaatgtatatttatgcgttttaattttaattatattcataacctatatattatattttacaacttcttagtttgaaaatcctttcaattattaagtcagcatccacctgctgatccagtgatatataaggacatttattgcaccactgaagtaaaatcagtgtcctttcaaacaagtgcagcttccagacaagtctcttagacctcatcctcagtctcaccctgactgacaagtttgccatacttgagaaccttgtgaagcaggcgttgtgtctataagctctcttagagatctgctctgaggaattatcaagtcagcacagttaattctctgtcatactgtgagtttagtcagggcagtaattatatttccccatcagcatattgtcttcccaaggataactacctgccattctgtaaacccccaaatttattaatgcagtcctttaaaaatacacaatgttacttgtctggtgtggctaaagcttatttatttatttatttatttatttttatagacatgatcttgctctgttgcccaggctggagtgcagtggtgccatcacagctcactgcagccttgaaatcctgggctcaagcaatccttcttcctcagctttttgagtacctaggactacaggtttatgccactgcacctagctaatgtttttattttttgtaaatatgggatcatgttatgttgccgaggctgctctccaattcctaacctcaagcaatcctcccaccctggcctcctaatgatagggacaggaggcagagaaattttaggcagaaaagggcggggtccctggcatgggtcctaccctgaagcctggaacatggccattcctgagatatttctctcagccagaactgtttcacattcacattttaagtgccaggtctttctatctttctagctgtcttattcatgcactttctagaaatcacttgtatattaacatgcctatattatatttacattcccttcatttctttattctctgtttgtctcatgaatattccctcaggaaacaccctcccacgccgttccctttatctagcttcttattcattcctcttgctgtactgattagccttgactcctcttatagctcaccccagcctcttggcattattatcaagtgttaccacagttgaacagctggatccaaaagtattgaccaataaggaacagaaaataaaacttgcaatgtaaattataatatggataagcattggtactaaacctgaagttagtattttactctatacctacaaggaagatatacaagtatttctctaaggtagtttgaaaagcctagatatagaaactggatcctcacatgagttcagtatataattgtaacagaataaaaaatcaattatgtattcaagttgctagtgtcttaagaggttcacatttttatctaactgattatcacaaaaatacttcgagttacttttcattataattcctgactacacatgaagagactgacacgtaggtgccttacttaggtaggttaagtaatttatccaaaaccacacaatgtagaacctaagctgattcggccatagaaacacaatatgtggtataaatgagacagagggatttctctccttcctatgctgtcagatgaatactgagatagaatatttagttcatctatcacacattaaacgggactttacatttctgtctgttgaagatttgggtgtggggataactcaaggtatcatatccaagggatggatgaaggcaggtgactctaacagaaagggaaaggatgttggcaaggctatgttcatgaaagtatatgtaaaatccacattaagcttctttctgcatgcattggcaatgtttatgaataatgtgtatgtaaaagtgtgctgtatattcaaaagtgtttcatgtgcctaggggtgtcaaatactttgagtttgtaagtatatacttctctgtaatgtgtctgaatatctctatttacttgattctcaataagtaggtatcatagtgaacatctgacaaatgtttgaggaacaatttagtgtttacctattcaccaaaatttattaaatgcctaatctgtatcagatatacaattatctggcgaaatctgtaattcctaatttaaacagctgtgtagcctaattagggataaaggcatgcaaacccataatttgtgtaggttgaaatgagctatagaaaaatgcagtatatttatcagaagtctttagggtcatgaaaaggaatggtcaactgacactgccagggactcatatgtaagagataactaatgtgaagtgactttaaaggagaaattagcagaagttttctttccatgtctcctcatcatgttacaataacggaagagattaaaacaacaaatacatttagacagcaatgtttatcctggttagatgttttaatctaaatctatcttggagtgttaaaatgcatttgctcacctactttaaaatataaatgaaggtaggaacctgtagatacaaaaagttggagaaaaaaagacaataaagatgacaaaaatctattaatccttgatagaaaatgagaagagataaaacactggtttacataaagaaaataagatggatagatagcagatccttataaaagtgataatttgagaaaaaaaatactccatattctgagtttcttcacataaaataatacaaatctgctgtggtaagttacaaagagatagattttttatcattatataaaagatattttaaacagagttatacaacaaaggaacagactatgtcatatattctcacttatcactataaacatctcagaaaaatctgcaaaatcatttcatagcattttaaatagttaggaataatgtagaaaactgaaacagttctaagtttcccacaaacttagagtctcaaatgttgcattacctaacttacctgcaaatattttatacaaatttgcacatgctactctagtcaaaaatatatgtacattatgggtattttctgtgtgtaacttggttctagttgcttctttcagaaatagcctctatttttgatttacctgataaaatcacattcctctccaaagccttctaaatacttccagactaactactttttagtacatctaagaagaaaagagttttgtctcttatccacctctgagtcaaaaagcagcatgtccatcaattggtacatagttcccacagccccacttagctctggattggagttctacttggcattgtttgcaactacatggacgtaaaatgcatggattctcttgaaaaaatgtttctgccatgatgttctctgaaagagactaaccttccctcgctttgcagagaaagactcgtgtaatccttgacaatgtcatctcatctatttattcccatgtctacccatatgtgaccttcatgtctttgctctaagcccctacatcctcaatctacacactaggatagtataaaagtaatagtaataatagtagtaatagtaataacaatacaatgattatggcttatactatacacaagacactgttgatatattatttcatttagtattcacagtaactctgtgcctcaagtactattgtaataccctttaagaggaggaaactgaggcacagggccctaaagtaatattccaagatgaagtggctactaactgacagagggcataattcaactcatgatatttggctctagaatacatgctctgaatcattatacaataataattcatgaggaaacattttttaaagcctaagttatttgctctgaaataagacataatttggggtgagaaagcttagattccatgaagtattacagcatttggtagtctttttgcactccaggtcttatttttactgcttaaacataataaaacatatggttcagtatgcctttgattttacaataatattcctgttatttttggaagcacagggtgtgggataatgctaattactagtgattagtattgagaggtgacagcgtgctggcagtcctcacagccctcgctcgctcttggcgcctcctctgcctgggctcccacattggtggcacttgaggagcccttcagccggccgctgcactgtgggagcccttttctgggctggccaaggccagagccggctccctcagcttgccaggaggtgtggagggacagacgcgggcaggaaccgggctgtgcgccgtgcttgagggagttccgggtgggcatgggctccgaggaccccgcactcggagccgccagccggccccaccggccgcgggcagtgaggggcttagcacctgggccagcagctgctgtgctcaattcctcgccgggccttagctgccttcctgcggggcagggctcgggacctgcagcgcgccatgcctgagcctccccaccttcatgggctcctgtgcggcccgagcctcgccgacgagcgccgccccctgctccagggcacccagtcccatcgaccacccaagggctgaagagtgcgggcgcacggcaggggactggcaggcagctccccctgcagcccaggtgcgggatccactgggtgaagccggctaggctcctgagtttgctggggatgcgaagaacccttatgtctagataagggattgtaaatacaccaattggcactctgtatctagctcaaggtttgtaaacacaccaatcagcaccctgtgtctagctcagggtttgtgaatgcaccaatcaacactctatctagctactctggtggggccttggagaacctttatgtctagctcagggattgtaaatacaccaatcggcagtctgtatctagctcaaggtttgtaaacacaccaatcagcaccctgtgtctagctcagggtttgtgaatgcaccaatcaacactctgtatctagctactctggtggggacgtggagaacctttatgtctagctcagggattgtaaatacaccactcggcagtctgtatctagctcaaggtttgtaaacacaccaatcagcaccctgtgtctagctcagggtttgtgaatgcaccaatcaacactctgtatctagctactctggtggggacttggagaacctttgtgtggacactctgtatctagctaatctggtggggacgtggagaacctttgtgtctagctcatggattgtaaatgcaccaatcagtgccctgtcaaaacagaccactgggctctaccaatcagcaggatgtgggtggggccagataagagaataaaagcaggctgcccgagccagcagtggcaacccgctcgggtccccttccacactgtggaagctttgttctttcgctctttgcaataaatcttgctgctgctcactgtttgggtctacactgcctttatgagctgtaacgctcaccgcgaaggtctgcagcttcactcttgaagccagcgagaccacgaacccaccgggaggaacgaacaactccagaggcgccgccttaagagctggaacgttcactgtgaaggtctgcagcttcactcctgagccagcgagaccacgaacccatcagaaggaagaaactccgaacacatccaaacatcagaacgaacaaactccacacacgcagcctttaagaactgtaacactcaccacgagggtccccggcttcattcttgaagtcagtgaaaccaagaacccaccaattccggacacagtatgtcagaaacaatatgagtcactaaatcaatatacttctcaacaatttccaacagcccttgcaattaacttggccatgtgactggttgtgactaaaataatgtggagataataatgtgttactccctaaggcagagtgcccttctatcattctctttcccttcctctatgtggcagaaagtaaaagattctgaaatgataaagtcaatcacaggaaggcacctggactcctggcccactgcttggaggagagcactcaggaccatgaacatctgactgtgacgtagcaataaagaaacccacgtttcatatgaaactgcttaaaattaatggcacaagtcatgtttttgatgttgcacatttgtctttatttgtggcttgttttgcttccacatcaatccactcaaggcctacattctgctataatgcaatttcaagttctttacaggccgagaaaaatgaatctgaattcctgacctccaaaagtgatcaagatatttttagttcaggctccaaaattttctcattttcataggttttcctcgattgatcattattcatgatttgcaaggaatcattcaatgttttctaaatctattactgcatcctgacacatatgacattttaactatgttccagatttttgaatgaagagtgtaaattttaaatgttttcaccacaaaaaataagtatgtgaagtggtggatttgttaattagccttatttaaccatttaatattgtacacgtacaccaaagcatcatgttgtaccccatgaatacacacaattattatttgtcaatttaaaatgaaataataaaaaataacaaaggcattagcctctgcattgcctttaccggtcatcctcacggtgactaacgcaaaaaacgttctatttcatccttacaaacatccctatctttgatgcctctttgtctagatctctatcccctcctgttttctctacgttatttatatgggtatcatcaccatcctggacaacatcaggacagatatccctcaccaagccaatgttcctctctatgttggctcaaatgtccttgaactttcctttcaccaccctttccacagtcaaaaggatattgtagtttaatgcctcagagttcagcttttaagcttctgacaaattattcttcctctttaggttctcctttatggaatcttctgtactgatggccatgtcctttaactactatgtagatatctgctactacctgtattatgcctctacctttattagcagagttatctgtactgttggcatgacaatcatttgttaatatgacttgcctttcctttttctgctattcttgatcaaatggctcctctttcttgctcctctcatttctcctgccttcacttggacgtgcttcacgtagtctgtgcttatgactggattaaaaattgatatggacttatcctaatgttgttcgtcataatatgggttttatggtccattattatttcctatgcattgatctggagaaggcttcaatccttttactctttgtggaaaatatctgtaaaccttctggttcactctgctatagcaatttcagtttaggctagtaagcatgaggatgcctccttctctgatttttcccacagtctgttggtcacagaataacctgagtgattactgatgaaagagtgagaatgttattgatagtcacaatgacaaaaaacaaacaactacagtcaaaatgtttctctttttattagtggattatatttcctgacctatatctggcaggactctttagagaggtagctgaagctgctgttatgaccactagagggaagaagatacctgtggagctaatggtccaagatggtggagccccaagcaaggaagttgttaaggagcccttttgattgaaggtgggtgcccccaccttacagggacaggacatctggatactcctcccagtttctccagtttccctttttcctaatatatctcctgataaaatgtctatactcacttccccatttctaataataaagcaaaggctagttagtaagacatcaccttgcattttgaaaatgccatagactttcaaaattatttcatacatcggtctttctttatttcaagagtccagaaatggcaacattacctttgattcaatgtaatggaaagagctctttcaagagacagagaaaagaataatttaatttctttccccacacctccttccctgtctcttaccctatcttccttccttctaccctccccatttctctctctcatttctcagaagtatattttgaaaggattcatagcagacagctaaggctggttttttctaagtgaagaagtgatattgagaaggtagggttgcatgagccctttcagttttttagtttatatacatctgtattgttagaatgttttataatataaataaaattatttctcagttatatactagctatgtaacctgtggatatttccttaagtattacaagctatacttaactcacttggaaaactcaaataaatacctgcttcatagttattaataaggattaagtgagataatgcccataagattcctattaataacagataaatacatacacacacacacacattgaaaggattcttactttgtgctaggaactataataagttcattgatgcattatatcattaagttctaatttcaacactagaaggcaggtattatctaaatttcatactggatacctccaaactcataaagataattaaattgccttttgtcatatatttattcaaaagggtaaactcaaactatggcttgtctaattttatatatcaccctactgaacatgaccctattgtgatattttataaaattattctcaagttattatgaggatgttgaaagacagagaggatggggtgctatgccccaaatcagcctcacaattaagctaagcagctaagagtcttgcagggtagtgtagggaccacagggttaagggggcagtagaattatactcccactttagtttcatttcaaacaatccatacacacacagccctgagcacttacaaattatactacgctctatactttttgtttaaatgtataaataagtggatgaaagaatagatagatagatagacagatagatgatagatagaataaatgcttgccttcatagctgtctccctaccttgttcaaaatgttcctgtccagaccaaagtaccttgccttcacttaagtaatcaattcctaggttatattctgatgtcaaaggaagtcaaaagatgtgaaaaacaatttctgacccacaactcatgctttgtagatgactagatcaaaaaatttcagccatatcttaacagtgagtgaacaggaaatctcctcttttccctacatctgagatcccagcttctaagaccttcaattctcactcttgatgcaacagaccttggaagcatacaggagagctgaacttggtcaacaaaggagaaaagtttgttggcctccaaaggcacagctcaaacttttcaagccttctctaatcttaaaggtaaacaagggtctcatttctttgagaacttcagggaaaatagacaaggacttgcctggtgcttttggtaggggagcttgcactttccccctttctggaggaaatatttatccccaggtagttccctttttgcaccagtggttctttgaagagacttccacctgggaacagttaaacagcaactacagggccttgaactgcacactttcagtccggtcctcacagttgaaaagacctaagcttgtgcctgatttaagcctttttggtcataaaacattgaattctaatctccctctcaaccctacagtcacccatttggtatattaaagatgtgttgtctactgtctagtatccctcaagtagtgtcaggaattagtcatttaaatagtctgcaagccaggagtggtggctcatgtctgtaattccagcacttgagaggtagaagtgggaggactgcttgagctcaagagtttgatattatcctggacaacatagcaagacctcgtctctacttaaaaaaaaaaaaaaaattagccaggcatgtgatgtacacctgtagtcccagctactcaggaggccgaaatgggaggatcccttgagctcaggaggtcaaggctgcagtgagacatgatcttgccactgcactccagcctggacagcagagtgaaaccttgcctcacgaaacagaatacaaaaacaaacaaacaaaaaactgctccgcaatgcgcttccttgatgctctaccacataggtctgggtactttgtacacattatctcattgctgttcataattgttagattaattttgtaatattgatattattcctagaaagctgaggcctcaagatgataacttttattttctggacttgtaatagctttctcttgtattcaccatgttgtaactttcttagagtagtaacaatataaagttattgtgagtttttgcaaacacagcaaacacaacgacccatatagacattgatgtgaaattgtctattgtcaatttatgggaaaacaagtatgtactttttctactaagccattgaaacaggaataacagaacaagattgaaagaatacattttccgaaattacttgagtattatacaaagacaagcacgtggacctgggaggagggttattgtccatgactggtgtgtggagacaaatgcaggtttataatagatgggatggcatctagcgcaatgactttgccatcacttttagagagctcttggggaccccagtacacaagaggggacgcagggtatatgtagacatctcattctttttcttagtgtgagaataagaatagccatgacctgagtttatagacaatgagcccttttctctctcccactcagcagctatgagatggcttgccctgcctctctactaggctgactcactccaaggcccagcaatgggcagggctctgtcagggctttgatagcactatctgcagagccagggccgagaaggggtggactccagagactctccctcccattcccgagcagggtttgcttatttatgcatttaaatgatatatttattttaaaagaaataacaggagactgcccagccctggctgtgacatggaaactatgtagaatattttgggttccatttttttttccttctttcagttagaggaaaaggggctcactgcacatacactagacagaaagtcaggagctttgaatccaagcctgatcatttccatgtcatactgagaaagtccccacccttctctgagcctcagtttctctttttataagtaggagtctggagtaaatgatttccaatggctctcatttcaatacaaaatttccgtttattaaatgcatgagcttctgttactccaagactgagaaggaaattgaacctgagactcattgactggcaagatgtccccagaggctctcattcagcaataaaattctcaccttcacccaggcccactgagtgtcagatttgcatgcactagttcacgtgtgtaaaaaggaggatgcttctttcctttgtattctcacatacctttaggaaagaacttagcacccttcccacacagccatcccaataactcatttcagtgactcaacccttgactttataaaagtcttgggcagtatagagcagagattaagagtacagatgctggagccagaccacctgagtgattagtgactcagtttctcttagtagttgtatgactcagtttcttcatctgtaaaatggagggttttttaattagtttgtttttgagaaagggtctcactctgtcacccaaatgggagtgtagtggcaaaatctcggctcactgcaacttgcacttcccaggctcaagcggtcctcccacctcaacatcctgagtagctggaaccacaggtacacaccaccatacctcgctaattttttgtatttttggtagagatggggtttcacatgttacacaggatggtctcagactccggagctcaagcaatctgcccacctcagccttccaaagtgctgggattataagcatgattacaggagttttaacaggctcataagattgttctgcagcccgagtgagttaatacatgcaaagagtttaaagcagtgacttataaatgctaactactctagaaatgtttgctagtattttttgtttaactgcaatcattcttgctgcaggtgaaaactagtgttctgtactttatgcccattcatctttaactgtaataataaaaataactgacatttattgaaggctatcagagactgtaattagtgctttgcataattaatcatatttaatactcttggattctttcaggtagatactattattatccccattttactacagttaaaaaaactacctctcaacttgctcaagcatacactctcacacacacaaacataaactactagcaaatagtagaattgagatttggtcctaattatgtctttgctcactatccaataaatatttattgacatgtacttcttggcagtctgtatgctggatgctggggatacaaagatgtttaaatttaagctccagtctctgcttccaaaggcctcccaggccaagttatccattcagaaagcattttttactctttgcattccactgtttttcctaagtgactaaaaaattacactttattcgtctgtgtcctgctctgggatgatagtctgactttcctaacctgagcctaacatccctgacatcaggaaagactacaccatgtggagaaggggtggtggttttgattgctgctgtcttcagttagatggttaactttgtgaagttgaaaactgtggctctctggttgactgttagagttctggcacttgtcactatgcctattatttaacaaatgcatgaatgcttcagaatatgggaatattatcttctggaatagggaatcaagttatattatgtaacccaggattagaagattcttctgtgtgtaagaatttcataaacattaagctgtctagcaaaagcaagggcttggaaaatctgtgagctcctcaccatatagaaagcttttaacccatcattgaataaatccctataggggatttctaccctgagcaaaaggctggtcttgattaattcccaaactcatatagctctgagaaagtctatgctgttaacgttttcttgtctgctaccccatcatatgcacaacaataaatgcaggcctaggcatgactgaaggctctctcataattcttggttgcatgaatcagattatcaacagaaatgttgagacaaactatggggaagcagggtatgaaagagctctgaatgaaatggaaaccgcaatgcttcctgcccattcagggctccagcatgtagaaatctggggctttgtgaagactggcttaaaatcagaagccccattggataagagtagggaagaacctagagcctacgctgagcaggtttccttcatgtgacagggagcctcctgccccgaacttccagggatcctctcttaagtgtttcctgctggaatctcctcacttctatctggaaatggtttctccacagtccagcccctggctagttgaaagagttacccatgcagaggccctcctagcatccagagactagtgcttagattcctactttcagcgttggacaacctggatccacttgcccagtgttcttccttagttcctaccttcgaccttgatcctcctttatcttcctgaaccctgctgagatgatctatgtggggagaatggcttctttgagaaacatcttcttcgttagtggcctgcccctcattcccactttaatatccagaatcactataagaagaatataataagaggaataactcttattataggtaagggaaaattaagaggcatacgtgatgggatgagtaagagaggagagggaaggattaatggacgataaaatctactactatttgttgagaccttttatagtctaatcaattttgctattgttttccatcctcacgctaactccataaaaaaacactattattatctttattttgccatgacaagactgagctcagaagagtcaagcatttgcctaaggtcggacatgtcagaggcagtgccagacctatgtgagactctgcagctactgctcatgggccctgtgctgcactgatgaggaggatcagatggatggggcaatgaagcaaaggaatcattctgtggataaaggagacagccatgaagaagtctatgactgtaaatttgggagcaggagtctctaaggacttggatttcaaggaattttgactcagcaaacacaagaccctcacggtgactttgcgagctggtgtgccagatgtgtctatcagaggttccagggagggtggggtggggtcagggctggccaccagctatcagggcccagatgggttataggctggcaggctcagataggtggttaggtcaggttggtggtgctgggtggagtccatgactcccaggagccaggagagatagaccatgagtagagggcagacatgggaaaggtgggggaggcacagcatagcagcatttttcattctactactacatgggactgctcccctatacccccagctaggggcaagtgccttgactcctatgttttcaggatcatcatctataaagtaagagtaataattgtgtctatctcatagggttattatgaggatcaaaggagatgcacactctctggaccagtggcctaacagttcaggacagagctatgggcttcctatgtatgggtcagtggtctcaatgtagcaggcaagttccagaagatagcatcaaccactgttagagatatactgccagtctcagagcctgatgttaatttagcaatgggctgggaccctcctccagtagaaccttctaaccagctgctgcagtcaaagtcgaatgcagctggttagactttttttaatgaaagcttagctttcattaaagattaagctcctaagcagggcacagatgaaattgtctaacagcaactttgccatctaaaaaaatctgacttcactggaaacatggaagcccaaggttctgaacatgagaaatttttaggaatctgcacaggagttgagagggaaacaagatggtgaagggactagaaaccacatgagagacacgaggaaatagtgtagatttaggctggaggtaaatgaaagagaagtgggaattaatacttactgaaatctttctatatgtcaggtgccattttatgatatttaataatctcattacatatggtaattctgtgagatatgtattattgaacatactataattaatactaatgataagtaacacctcttgagtacttagtatatgctagaatcaaatttaagtttatcatatgaggccgggcacggtggctcatatatgggattacatgcctgtaatcccagcactttgggaggccaaggcaattggatcacctgaggtcaggagttccagaccagcctggccaacatggtgaaaccccttctctactaaaaaatacaaaaaatcagccaggtgtggtggcacgcgtctataatcccagctactcaggaggctgaggcaggagaatcacttgaacccaggaggtggaggttgcagtgagctaagattgcaccactgcactccagcctaggcgacagagtgagactccatctcaaaaaaaaaaaaagaagtttattatatgaattaacttagttttactcacaccaatactcagaagtagattattacctcatttattgatgaggagcccaatgtacttgtagtgtagatcaacttattgaaagcacaagctaataagtagacaattagtaattagaagtcagatggtctgagctctcctactgtctacattacatgagctcttattaactggggactcgaaaatcaaagacatgaaataatttgtccaagcttacagaaccaccaagtagtaaggctaggatgtagacccagttctgctacctctgaagacagtgttttttccacagcaaaacacaaactcagatattgtggatgcgagaaattagaagtagatattcctgccctgtggcccttgcttcttacttttacttcttgtcgattggaagttgtggtccaagccacagttgcagaccatacttcctcaaccataattgcatttcttcaggaaagtttgagggagaaaaaggtaaagaaaaatttagaaacaacttcagaataaagagattttctcttgggttacagagattgtcatatgacaaattataagcagacacttgagaaaactgaaggcccatgcctgcccaaattaccctttgaccccttggtcaagctgcaactttggttaaagggagtgtttatgtgttatagtgttcatttactcttctggtctaacccattggctccgtcttcatcctgcagtgacctcagtgcctcagaaacatacatatgtttgtctagtttaagtttgtgtgaaattctaactagcgtcaagaactgagggccctaaactatgctaggaatagtgctgtggtgctgtgataggtacacaagaaatgagaagaaactgcagattctctgcatctccctttgccgggtctgacaacaaagtttccccaaattttaccaatgcaagccatttctccatatgctaactactttaaaatcatttggggcttcacattgtctttctcatctgtaaaaagaatggaagaactcattcctacagaactccctatgtcttccctgatgggctagagttcctctttctcaaaaattagccattattgtatttccttctaagccaaagctcagaggtcttgtattgcccagtgacatgcacactggtcaaaagtaggctaagtagaagggtactttcacaggaacagagagcaaaagaggtgggtgaatgagagggtaagtgagaaaagacaaatgagaagttacaacatgatggcttgttgtctaaatatctcctagggaattattgtgagaggtctgaatagtgttgtaaaataagctgaatctgctgccaacattaacagtcaagaaatacctccgaataactgtacctccaattattctttaaggtagcatgcaactgtaatagttgcatgtatatatttatcataatactgtaacagaaaacacttactgaatatatactgtgtccctagttctttacacaataaactaatctcatcctcataattctattagctaatacatattatcatcctatatttcagagacttcaagaagttaagcaacttgctcaagatcatctaagaagtaggtggtatttctgggctcatttggcccctcctaatctctcatggcaacatggctgcctaaagtgttgattgccttaattcatcagggatgggctcatactcactgcagaccttaactggcatcctcttttcttatgtgatctgcctgaccctagtagacttatgaaatttctgatgagaaaggagagaggagaaaggcagagctgactgtgatgagtgatgaaggtgccttctcatctgggtaccagtggggcctctaagactaagtcactctgtctcactgtgtcttagccagttccttacagcttgccctgatgggagatagagaatgggtatcctccaacaaaaaaataaattttcatttctcaaggtccaacttatgttttcttaatttttaaaaaaatcttgaccattctccactctctaaaataatccacagtgagagaaacattcttttcccccatcccataaatacctctattaaatatggaaaatctgggcatggtgtctcacacctgtaatcccagcactttgggaggctgaggtgggtggactgcttggagctcaggagttcaagaccatcttggacaacatggtgataccctgcctctacaaaaagtacaaaaattagcctggcatggtggtgtgcacctgtaatcccagctattagggtggctgaggcaggagaattgcttgaacccgggaggcggaggttgcagtgagctgagatcgtgccactgcactccagcctgggggacagagcacattataattaactgttattttttacttggactcttgtggggaataagatacatgttttattcttatttatgattcaagcactgaaaatagtgtttagcatccagcaggtgcttcaaaaccatttgctgaatgattactatactttttacaagctcagctccctctatcccttccagcatcctcatctctgattaaataagcttcagtttttccttagttcctgttacatttctgtgtgtctccattagtgacctcccatagtccaagcatgagcagttctggccaggcccctgtcggggtcagtgccccacccccgccttctggttctgtgtaaccttctaagcaaaccttctggctcaagcacagcaatgctgagtcatgatgagtcatgctgaggcttagggtgtgtgcccagatgttctcagcctagagtgatgactcctatctgggtccccagcaggatgcttacagggcagatggcaaaaaaaaggagaagctgaccacctgactaaaactccacctcaaacggcatcataaagaaaatggatgcctgagacagaatgtgacatattctagaatatattatttcctgaatatatatatatatatacacatatacgtatatatatatatatatatatatttgttgttatcaattgccatagaatgattagttattgtgaatcaaatatttatcttgcaggtggcctctatacctagaagcggcagaatcaggctttattaatacatgtgtatagatttttaggatctatacacatgtattaatatgaaacaaggatatggaagaggaaggcatgaaaacaggaaaagaaaacaaaccttgtttgccattttaaggcacccctggacagctaggtggcaaaaggcctgtgctgttagaggacacatgctcacatacggggtcagatctgacttggggtgctactgggaagctctcatcttaaggatacatctcaggccagtcttggtgcattaggaagatgtaggcaactctgatcctgagaggaaagaaacattcctccaggagagctaaaagggttcacctgtgtgggtaactgtgaaggactacaagaggatgaaaaacaatgacagacagacataatgcttgtgggagaaaaaacaggaggtcaaggggatagagaaggcttccagaagaatggctttgaagctggcttctgtaggagttcacagtggcaaagatgtttcagaaatgtgacatgacttaaggaactatacaaaaaggaacaaatttaaggagaggcagataaattagttcaacagacatgcaaggaattttcagatgaatgttatgtctccactgagcttcttgaggttagcagctgtgagggttttgcaggcccaggacccattacaggacctcacgtatacttgacactgttttttgtattcatttgtgaatgaatgacctcttgtcagtctactcggtttcgctgtgaatgaatgatgtcttgtcagcctacttggtttcgctaagagcacagagagaagatttagtgatgctatgtaaaaacttcctttttggttcaagtgtatgtttgtgatagaaatgaagacaggctacatgatgcatatctaacataaacacaaacattaagaaaggaaatcaacctgaagagtatttatacagataacaaaatacagagagtgagttaaatgtgtaataactgtggcacaggctggaatatgagccatttaaatcacaaattaattagaaaaaaaacagtggggaaaaaattccatggatgggtctagaaagactagcattgttttaggttgagtggcagtgtttaaagggtgatatcagactaaacttgaaatatgtggctaaataactagaatactctttattttttcgtatcatgaatagcagatatagcttgatggccccatgcttggtttaacatccttgctgttcctgacatgaaatccttaatttttgacaaaggggctattcattttcattttatattgggcctagaaattatgtagatggtcctgaggaaaagtttatagcttgtctatttctctctctaacatagttgtcagcacaatgcctaggctataggaagtactcaaagcttgttaaattgaattctatccttcttattcaattctacacatggaggaaaaactcatcagggatggaggcacgcctctaaggaaggcaggtgtggctctgcagtgtgattgggtacttgcaggacgaagggtggggtgggagtggctaaccttccattcctagtgcagaggtcacagcctaaacatcaaattccttgaggtgcggtggctcactcctgtaatcacagcagtttgggacgccaaggtgggcagatcacttgaggtcaggagttggacaccagcccagccaacatagtgaaacctggtctctgcttaaaaatataaaaattagctggacgtggtgacgggagcctgtaatccaactacttgggaggctgaggcaggagaatcgcttgaaccggggaggtggagtttgcactgagcagagatcatgccattgcactccagcctccagagcgagactctgtctaaagaaaaacgaaaacaaacaaacaaacaaacaaacaaaacccatcaaattccctgaccgaacagaattctgtctgattgttctctgacttatctaccattttccctccttaaagaaactgtgaacttccttcagctagaggggcctggctcagaagcctctggtcagcatccaagaaatacttgatgtcactttggctaaaggtatgatgtgtagacaagctccagagatggtttctcatttccatatccacccacccagctttccaattttaaagccaattctgaggtagagactgtgatgaacaaacaccttgacaaaattcaacccaaagactcactttgcctagcttcaaaatccttactctgacatatactcacagccagaaattagcatgcactagagtgtgcatgagtgcaacacacacacacaccaattccatattctctgtcagaaaatcctgttggtttttcgtgaaaggatgttttcagaggctgaccccttgccttcacctccaatgctaccactctggtctaagtcactgtcaccaccacctaaattatagctgttgactcataacaatcttcctgcttctaccactgccccactacaatttcttcccaatatactatccaaattagtcttttcaaaatgtaagtcatatatggtcacctctttgttcaaagtcttctgatagtttcctatatcatttataataaaaccaaatccttacaattctctacaatagttgttcatgcatatattatgtttattacagatacatatatatagctctcatataaataaatatatatatttatgtgtatgtgtgtagagtgttttttcttacaactctatgatgtaggtattattagtgtcccaaattttataatttaggacttctatgatctcatcttttattctccccttcaccgaatctcatcctacattggccttattgatattccttgaaaattctaagcatcttacatctttagggtatttacatttgccattccctatgccctaaatatttaatcatagtttcatataaatgggttcctcatcatctatgggtactctctcaggtgttaactttatagtgaggactttcctgccatactacttaaagtagcgataccctttcaccctgtcctaatcacactctggccttcatttcagttttttttttttctccatagcacctaatctcattggtatataacatgtttcatttgcttatttaatgtcaagctctttccactatcaagtccatgaaaacaggaactttattcctctattctgtttttgtgctgtattcttagcaattttacaattttgaatgaatgaatgagcagtcaaacacatatacaactataattaaaaggatgtatgctgacacatccactgctatgcacacacaaagaaatcagtggagtagagctggaagtgctaagcctgcatagagctagttagccctccgcaggcagagccttgatgggattactgagttctagaattggactcatttgttttgtaggctgagatttgctcttgaaaacttgttctgaccaaaataaaaggctcaaaagatgaatatcgaaaccagggtgttttttacactggaatttataactagagcactcatgtttatgtaagcaattaattgtttcatcagtcaggtaaaagtaaagaaaaactgtgccaaggcaggtagcctaatgcaatatgccactaaagtaaacattatttcataggtgtcagatatggcttattcatccatcttcatgggaaggatggccttggcctggacatcagtgttatgtgaggttcaaaacacctctaggctataaggcaacagagctccttttttttttttctgtgctttcctggctgtccaaatctctaatgataagcatacttctattcaatgagaatattctgtaagattatagttaagaattgtgggagccattccgtctcttatagttaaatttgagcttcttttatgatcactgtttttttaatatgctttaagttctggggtacatgtgccatggtggtttgctgcacccatcaacccgtcatctacattaggtatttctcctaatgctatccttcccctagccccccacccccaacaggccccagtgtgtgatgttcccctccctgtgtccatggatcactggtttttttttgttttttttttttttttaaagtctcagttaaatttttggaatgtaatttattttcctggtatcctaggacttgcaagttatctggtcactttagccctcacgttttgatgataatcacatatttgtaaacacaacacacacacacacacacacacacatatatatatatataaaacatatatatacataaacacacataacatatttatcgggcatttctgagcaactaatcatgcaggactctcaaacactaacctatagccttttctatgtatctacttgtgtagaaaccaagcgtggggactgagaaggcaatagcaggagcattctgactctcactgcctttagctaggcccctccctcatcacagctcagcatagtcctgagctcttatctatatccacacacagtttctgacgctgcccagctatcaccatcccaagtctaaagaaaaaaataatgggtttgcccatctctgttgattagaaaacaaaacaaaataaaataagcccctaagctcccagaaaacatgactaaaccagcaagaagaagaaaatacaataggtatatgaggagactggtgacactagtgtctgaatgaggcttgagtacagaaaagaggctctagcagcatagtggtttagaggagatgtttctttccttcacagatgccttagcctcaataagcttgcggttgtggaagtttactttcagaacaaactcctgtggggctagaattattgatggctaaaagaagcccgggggagggaaaaatcattcagcatcctcacccttagtgacacaaaacagagggggcctggttttccatatttcctcatgatggatgatctcgttaatgaaggtggtctgacgagatcattgcttcttccatttaagccttgctcacttgccaatcctcagttttaaccttctccagagaaatacacattttttattcaggaaacatactatgttatagtttcaatactaaataatcaaagtactgaagatagcatgcataggcaagaaaaagtccttagctttatgttgctgttgtttcagaatttaaaaaagatcaccaagtcaaggacttctcagttctagcactagaggtggaatcttagcatataatcagaggtttttcaaaatttctagacataagattcaaagccctgcacttaaaatagtctcatttgaattaactctttatataaattgaaagcacattctgaactacttcagagtattgttttatttctatgttcttagttcataaatacattaggcaatgcaatttaattaaaaaaacccaagaatttcttagaattttaatcatgaaaataaatgaaggcatctttacttactcaaggtcccaaaaggtcaaagaaaccaggaaagtaaagctatatttcagcggaaaatgggatatttatgagttttctaagttgacagactcaagttttaaccttcagtgcccatcatgtaggaaagtgtggcataactggctgattctggctttctactcctttttcccattaaagatccctcctgcttaattaacattcacaagtaactctggttgtactttaggcacagtggctcccgaggtcagtcacacaataggatgtctgtgctccaagttgccagagagagagattactcttgagaatgagcctcagccctggctcaaactcacctgcaaacttcgtgagagatgaggcagaggtacactacgaaagcaacagttagaagctaaatgatgagaacacatggactcatagagggaaacaacgcatactggggcctatcagagggtggagggtgagagaaggagaggatcaggaaaaatcactaatggatgctaagcgtaatacctgagtgatgagatcatctatacaacaaacccccttgacattcatttatctatgtaacaaacctgcacatcctgtacatgtacccctgaacttaaaataaaagttgaaaacaagaaagcaacagtttgaacacttgttatggtctattctctcattctttacaattacactagaaaatagccacaggcttcctgcaaggcagccacagaatttatgacttgtgatatccaagtcattcctggataatgcaaaatctaacacaaaatctagtagaatcatttgcttacatctatttttgttctgagaatatagatttagatacataatggaagcagaataatttaaaatctggctaatttagaatcctaagcagctcttttcctatcagtggtttacaagccttgtttatatttttcctattttaaaaataaaaataaagtaagttatttgtggtaaagaatattcattaaagtatttatttcttagataataccatgaaaaacattcagtgaagtgaagggcctactttacttaacaagaatctaatttatataatttttcatactaatagcatctaagaacagtacaatatttgactcttcaggttaaacatatgtcataaattagccagaaagatttaagaaaatattggatgtttccttgtttaaattaggcatcttacagtttttagaatcctgcatagaacttaagaaattacaaatgctaaagcaaacccaaacaggcaggaattaatcttcatcgaatttgggtgtttctttctaaaagtcctttatacttaaatgtcttaagacatacatagattttattttactaattttaattatatagacaataaatgaatattcttactgattactttttctgactgtctaatctttctgatctatcctggatggccataacacttatctctctgaactttgggcttttaatataggaaagaaaagcaataatccatttttcatggtatctcatatgataaacaaataaaatgcttaaaaatgagcaggtgaagcaatttatcttgaaccaacaagcatcgaagcaataatgagactgcccgcagcctacctgacttctgagtcaggatttataagccttgttactgagacacaaacctgggcctttcaatgctataacctttcttgaagctcctccctaccacctttagccataaggaaacatggaatgggtcagatccctggatgcaagccaggtctggaaccataggcagtaaggagagaagaaaatgtgggctctgcaactggctccgagggagcaggagaggatcaaccccatactctgaatctaagagaagactggtgtccatactctgaatgggaagaatgatgggattacccatagggcttgttttagggagaaacctgttctccaaactcttggccttgagatacctggtccttattccttggactttggcaatgtctgaccctcacattcaagttctgaggaagggccactgccttcatactgtggatctgtagcaaattccccctgaaaacccagagctgtatcttaattggttaaaaaaaattatattatctcaacgactgttcttctctgagtagccaagctcagcttggttcaagctacaagcagctgagctgctttttgtctagtcattgttcttttatttcagtggatcaaatacgttctttccaaacctaggatcttgtcttcctaggctatatattttgtcccaggaagtcttaatctggggtccacagaacactagggggctggtgaagtttatagaaaaaaaatctgtatttttacttacatgtaactgaaatttagcattttcttctactttgaatgcaaaggacaaactagaatgacatcatcagtacctattgcatagttataaagagaaaccacagatattttcatactacaccataggtattgcagatctttttgtttttgtttttgtttgagatggagtttcgctcttattgcccaggctggagtgcagtggcatgatttcggctcactgcaacctccccttcctgcattcaagcaattctcctgccttggcctcctgagtagctggggattacaggcacctgccaccatgccagtctaatttttgtatttttagtagagatggggtttcgccatgttggccaggctggtcttgaactcctgacctcagatgatctgcccgccttggcctcctgaagtgctgggattataggtgtgagccaccacgcctggcccattgcagatatttttaattcacatttatctgcatcactacttggatcttaaggtagctgtagacccaatcctagatctaatgctttcataaagaagcaaatataataaatactataccacaaatgtaatgtttgatgtctgataatgatatttcagtgtaattaaacttagcactcctatgtatattatttgatgcaataaaaacatatttttttagcacttacagtctgccaaactggcctgtgacacaaaaaaagtttaggaattcctggttttgtctgtgttagccaatggttagaatatatgctcagaaagataccattggttaatagctaaaagaaaatggagtagaaattcagtggcctggaataataacaatttgggcagtcattaagtcaggtgaagacttctggaatcatgggagaaaagcaagggagacattcttacttgccacaagtgtttttttttttttttttttttatcacaaacataagaaaatataataaataacaaagtcaggttatagaagagagaaacgctcttagtaaacttggaatatggaatccccaaaggcacttgacttgggagacaggagccatactgctaagtgaaaaagacgaagaacctctagggcctgaacatacaggaaattgtaggaacagaaattcctagatctggtggggcaaggggagccataggagaaagaaatggtagaaatggatggagacggaggcagaggtgggcagatcatgaggtcaagagatcgagaccatcctggcaaacatggtgaaatcccgtctctactaaaaataaaaaaattagctgggcatggtggcatgcgcctgtagtcccagctgctcgggaggctgaggcaggagaatcgtttgaacccaggaggcgaaggttgcagtgagctgagatagtgccattgcactccagtctggcaacagagtgagactccgtctcaaaaaaaaaaaaaaaagaaagaaagaaaagaaaaagaaaaaagaaaaaataaatggatgtagaacaagccagaaggaggaactgggctggggcaatgagattatggtgatgtaagggacttttatagaattaacaatgctggaatttgtggaactctgcttctattattcccccaatcattacttctgtcacattgatagttaaataatttctgtgaatttattccttgattctaaaatatgaggataatgacaatggtattataagggcagattaagtgatatagcatgagcaatattcttcaggcacatggatcgaattgaatacactgtaaatcccaacttccagtttcagctctaccaagtaaagagctagcaagtcatcaaaatggggacatacagaaaaaaaaaaggacactagaggaataatataccctgactcctagcctgattaatatatcgattcacttttttctctgtttgatgacaaattctggctttaaataattttaggattttaggcttctcagctcccttcccagtgagaagtataagcaggacagacaggcaagcaagaagagagccccaggcaatactcacaaagtagccaatgtcccctgtggtcatagagaaatgaaaagagagaggattctctggaagcactggatgtaatcttttctgtctgtcctctctagggaatcaccccaaggtactgtactttgggattaaggctttagtcccactgtggactacttgctattctgttcagtttctagaaggaactatgtacggtttttgtctccctagagaaactaaggtacagaagttttgtttacaatgcactccttaagagagctagaactgggtgagattctgttttaacagctttattttcttttccttggccctgtttttgtcactgtcaccacctttaaggcaaatgttaaatgcgctttggctgaaactttttttcctattttgagatttgctcctttatatgaggctttcttggaaaaggagaatgggagagatggatatcattttggaagatgatgaagagggtaaaaaaggggacaaatggaaatttgtgttgcagatagatgaggagccaacaaaaaagagcctcaggatccagcacacattatcacaaacttagtgtccatccatcactgctgaccctctccggacctgactccacccctgagggacacaggtcagccttgaccaatgacttttaagtaccatggagaacagggggccagaacttcggcagtaaagaataaaaggccagacagagaggcagcagcacatatctgcttccgacacagctgcaatcactagcaagctctcaggcctggcatcatggtgcattttactgctgaggagaaggctgccgtcactagcctgtggagcaagatgaatgtggaagaggctggaggtgaagccttgggcaggtaagcattggttctcaatgcatgggaatgaagggtgaatattaccctagcaagttgattgggaaagtcctcaagattttttgcatctctaattttgtatctgatatggtgtcatttcatagactcctcgttgtttacccctggacccagagattttttgacagctttggaaacctgtcgtctccctctgccatcctgggcaaccccaaggtcaaggcccatggcaagaaggtgctgacttcctttggagatgctattaaaaacatggacaacctcaagcccgcctttgctaagctgagtgagctgcactgtgacaagctgcatgtggatcctgagaacttcaaggtgagttcaggtgctggtgatgtgattttttggctttatattttgacattaattgaagctcataatcttattggaaagaccaacaaagatctcagaaatcatgggtcgagcttgatgttagaacagcagacttctagtgagcataaccaaaacttacatgattcagaactagtgacagtaaaggactactaacagcctgaattggcttaacttttcaggaaatcttgccagaacttgatgtgtttatcccagagaattgtattatagaattgtagacttgtgaaagaagaatgaaatttggcttttggtagatgaaagtccatttcaaggaaatagaaatgccttattttatgtgggtcatgataattgaggtttagaaagagatttttgcaaaaaaaataaaagatttgctcaaagaaaaataagacacattttctaaaatatgttaaatttcccatcagtattgtgaccaagtgaaggcttgtttccgaatttgttggggattttaaactcccgctgagaactcttgcagcactcacattctacatttacaaaaattagacaattgcttaaagaaaaacagggagagagggaacccaataatactggtaaaatggggaagggggtgagggtgtaggtaggtagaatgttgaatgtagggctcatagaataaaattgaacctaagctcatctgaattttttgggtgggcacaaaccttggaacagtttgaggtcagggttgtctaggaatgtaggtataaagccgtttttgtttgtttgtttgttttttcatcaagttgttttcggaaacttctactcaacatgcctgtgtgttattttgtcttttgcctaacagctcctgggtaacgtgatggtgattattctggctactcactttggcaaggagttcacccctgaagtgcaggctgcctggcagaagctggtgtctgctgtcgccattgccctggcccataagtaccactgagttctcttccagtttgcaggtgttcctgtgaccctgacaccctccttctgcacatggggactgggcttggccttgagagaaagccttctgtttaataaagtacattttcttcagtaatcaaaaattgcaattttatcttctccatcttttactcttgtgttaaaaggaaaaagtgttcatgggctgagggatggagagaaacataggaagaaccaagagcttccttaagaaatgtatgggggcttgtaaaattaatgtggatgttatgggagaattccaggattccaaggaggatgatatgatggagaaaaatctttatcggggtgggaaaatggttaattaagtggacagagactcctaggcagtttttactgcaccggggaaagaaggagctgttagtggtacctgagaaagcagatttgtggtacatgtcacttttcattaaaaacaaaaacaaaacaaaacaaaacttcatagatatccaagatataggctagaattactattttaatttactcttatttacattttgaagtagctagcttgtcacatgttttatgaaattgatttggagataagatgagtgtgtatcaacaatagcctgctctttccatgaaggattccattatttcatgggttagctgaagctaagacacatgatatcattgtgcattatcttctgatagaatgtaacatgcactaaaataaagttagagttaggacc

SEQ ID NO: 847 - DNA, 2789 bp, Homo sapiens
  source 1..2789: mol_type = genomic DNA
agaaattgttttcactgcactattgagaaattaagagataatggcaaaagtcacaaagagtatattcaaaaagaagtatagcactttttccttagaaaccactgctaactgaaagagactaagatttgtcccgtcaaaaatcctggacctatgcctaaaacacatttcacaatccctgaacttttcaaaaattggtacatgctttagctttaaactacaggcctcactggagctagagacaagaaggtaaaaaacggctgacaaaagaagtcctggtatcctctatgatgggagaaggaaactagctaaagggaagaataaattagagaaaaactggaatgactgaatcggaacaaggcaaaggctataaaaaaaattagcagtatcctcttgggggccccttccccacactatctcaatgcaaatatctgtctgaaacggtccctggctaaactccacccatgggttggccagccttgccttgaccaatagccttgacaaggcaaacttgaccaatagtcttagagtatccagtgaggccaggggccggcggctggctagggatgaagaataaaaggaagcacccttcagcagttccacacactcgcttctggaacgtctgaggttatcaataagctcctagtccagacgccatgggtcatttcacagaggaggacaaggctactatcacaagcctgtggggcaaggtgaatgtggaagatgctggaggagaaaccctgggaaggtaggctctggtgaccaggacaagggagggaaggaaggaccctgtgcctggcaaaagtccaggtcgcttctcaggatttgtggcaccttctgactgtcaaactgttcttgtcaatctcacaggctcctggttgtctacccatggacccagaggttctttgacagctttggcaacctgtcctctgcctctgccatcatgggcaaccccaaagtcaaggcacatggcaagaaggtgctgacttccttgggagatgccacaaagcacctggatgatctcaagggcacctttgcccagctgagtgaactgcactgtgacaagctgcatgtggatcctgagaacttcaaggtgagtccaggagatgtttcagccctgttgcctttagtctcgaggcaacttagacaacggagtattgatctgagcacagcagggtgtgagctgtttgaagatactggggttgggggtgaagaaactgcagaggactaactgggctgagacccagtggtaatgttttagggcctaaggagtgcctctaaaaatctagatggacaattttgactttgagaaaagagaggtggaaatgaggaaaatgacttttctttattagattccagtagaaagaactttcatctttccctcatttttgttgttttaaaacatctatctggaggcaggacaagtatggtcgttaaaaagatgcaggcagaaggcatatattggctcagtcaaagtggggaactttggtggccaaacatacattgctaaggctattcctatatcagctggacacatataaaatgctgctaatgcttcattacaaacttatatcctttaattccagatgggggcaaagtatgtccaggggtgaggaacaattgaaacatttgggctggagtagattttgaaagtcagctctgtgtgtgtgtgtgtgtgtgcgcgcgcgcgtgtgtgtgtgtgtgtcagcgtgtgtttcttttaacgtcttcagcctacaacatacagggttcatggtggcaagaagatagcaagatttaaattatggccagtgactagtgcttgaaggggaacaactacctgcatttaatgggaaggcaaaatctcaggctttgagggaagttaacataggcttgattctgggtggaagcttggtgtgtagttatctggaggccaggctggagctctcagctcactatgggttcatctttattgtctcctttcatctcaacagctcctgggaaatgtgctggtgaccgttttggcaatccatttcggcaaagaattcacccctgaggtgcaggcttcctggcagaagatggtgactgcagtggccagtgccctgtcctccagataccactgagctcactgcccatgattcagagctttcaaggataggctttattctgcaagcaatacaaataataaatctattctgctgagagatcacacatgattttcttcagctcttttttttacatctttttaaatatatgagccacaaagggtttatattgagggaagtgtgtatgtgtatttctgcatgcctgtttgtgtttgtggtgtgtgcatgctcctcatttatttttatatgagatgtgcattttgatgagcaaataaaagcagtaaagacacttgtacacgggagttctgcaagtgggagtaaatggtgtaggagaaatccggtgggaagaaagacctctataggacaggacttctcagaaacagatgttttggaagagatgggaaaaggttcagtgaagacctgggggctggattgattgcagctgagtagcaaggatggttcttaaggaagggaaagtgttccaagctttaggaattcaaggtttagtcaggtgtagcaattctattttattaggaggaatactatttctaatggcacttagcttttcacagcccttgtggatgcctaagaaagtgaaattaatcccatgccctcaagtgtgcagattggtcacagcatttcaagggagagacctcattgtaagactctgggggaggtggggacttaggtgtaagaaatgaatcagca

SEQ ID NO: 848 - DNA, 253618 bp, Homo sapiens
  source 1..253618: mol_type = genomic DNA
gtcttcacatgggtatattctatgtacatatgtacaagcatacatacaaaacacagtctgttaaatcagagtttcatcgcaaaatggaagtgtaaacctaagaaacattcacagtattttcctatcaaggaagtaaagaggtcttgatgggggatacctaaaagtggctgtggtgtgtgtttagatgtcagagactcagtactgggagagagggaacctctacttggagctcaggatattttgatcagcctgtgtaacttagagctgctagcacacggtttaaaggagataaaagcagcctttgggaaaacatttattctagcgatttaggtttcaatgtttaggtggagcacaaggttcctgatatgatttggctctgtggccccacccaaatctcatcttgtagctcccataattcccacctgttgtgggagggacctggtgtgagatgattgaatcatgggggtgggtctttcccatgctgttctcgtgacagtgaatgggtctcacgagatctgatggttttaaaaaccggagttgctctacacaagctctctttttgcctgctgccattccagtaggatgtgacttgcttctcctggccatggttgtgaggcctccccagctatgtggaactgtaagtccggtaaacctctttcttttataaattgcccagtctcgggtatatcttcattagcagcgtgaaaacggacaaatacagcttcagtttcccctcactccactccccattaggggatagtttttgtccagattaaagaaaaacctattgtttatggtggtgctaggggaaatgaagaggaaagtcttgcctctccattttcttccgttcatgaggtgagttctctgggtctgcctctgactggggaagatatacattgaaccccaaatttccatccttggaagtccagataggtctgaggaaaaaaacaaaaaacctaatagcaatgttactgcatttatctgccttccatttgagccaaagaaaacctgagggtcatatgaagtgaagtcctgttaattggaaggccaggtgggtctgaggaaaaaagcaaaaacaaaacaaaacaaaaaaacacctaatgggaagaaatgttactgtttttatctgcctttcatctgggccaaagaaaacctgaggctcctttgaagttaagccctgctcatcagggaagacaccaggtgaattgggtctaaaagtcttagctagggagaagagtgttcatttagtggataattctcttgccataacctcttagagctcttcacaattgactgggtgcttggaatccttgctctagcttcattaaagagtaaactcatcagcctcatgcctggctccaaggtggtgaatccaggaggaggaggcttctggggcagggagggtcactgtcttctacctagcagctaaggtagggcctggtacgtggaaagtgtgcaatcagtgattgaaggagtgttaaacaatgagtgactaagttagaaaacaaatgaggaagtgactggggacactggatagatacaaatcaaattaaagatgtcacaggaccaaagcttgtgcttgggaaaataaaggctatgagaattttagggggaggaggtccctgcaggctgatgttgctgaaagagcaggcctcctaggacttcccatctgctgtccctgttcttacactctatcagccatggcccaagatcaaatctgagttgtggaaggacatgacaagggggttacacaggtggcgaagagaagatagagtcacagagttttggtcatgctgggcctactgcatggccctttccaaagaaattgtactctttcttcagaccaagagatttgctagaaagcagaaaaacaagccgtgttaaagtctgcaatactgagagctgatgtggataacaattagctaggaaagtagacggcagttaaggagaaagttatccaaaccataaaaagtgcttttaagcatcagtgttatttcttttttttctttaaaaaaacaaaactaatatcttcatcataaacacatgcccatattttttttctatatgttttagggcttcattacttgtatttatttaatattaattttagctaacacttattgaggctttactatatgtcaggctctgttccaagcttttaccatcggattccacacaatagtcctttagcgcagatattagtagtatccctagtttatggatgagggcagctgaggcaaatgaagaggggaagtacatcacttaaagctataaagcacttcatattacagccaggattagacagtctaattccagagcccatactcttaatcactgcaataaatcaagttaatttaatttatgctttaatccttacccctcaaaaagtagagcagggcagaatttgtgatattgaaatttttacccccgagtcctgcgagtatctacactagactgaaatgtcgtcattaccatagcctacatatgcatagatgtttttgtttctttgctttttattttatctaatactacacttcctcaattattttaactttgaaatatttaatgacaaaaagaataatgcctgacattgcaagataccattggctaattttgtctatttttccaagtacactttatagcagatgtcaaatttcagaaaaggccaaatgagattttgattggctttttattataaattggaacatgttgaggaatttgcaataggcagtctttccttttaaaatagggaatatttctatttaaactttatttctttgtaaaaaaaagtgtagtttcttcaaataagctttacgcatttgggtttatttacacgtgacattttttgattgttattttgaatgacagtttttttcattatattttctgggtgaattagactgtgatgaaactgtgctattaccagttgctgtgttattacttcagatctttgttaatagatgctcatgcaatcgagtgtatgcatctttgataaatagttgcaaagcctctactcttctaataatttgtatgtatgtaagttgtacataagataggtaaaataagaatatagaaaaattcactacacagatagcactaccaatactatgatgtttgtacttttatatattttaatacaactatgattgtactgtgcatagtttcataacctacctttttaacttggtaatatatcatgaatttttccaagttattaccctttgacactcacagttcaataaatatttcctgcacatattgtatgtaagaaatgatgtttggtgctaggaatacaatggcgaacaagattagatatgtttcctaccctaaggagtttaaaatatagtggcaatgacatatttcagttaactcttaaagagatctcacggaaaactaggcactgttctatagcctttgcatatattcatttatttcttacagaaaccctgtaaggtaggctctataattacacctatttttacaggtaagtaaactaaggcataagaaggtaaagtgtctagtccaagattaggtagcatgtgaaggaatggttgagctggagttggaatttgaaccggtctttctagagaccacattcttctctcacttctattacacaaatgattattggtttataattacaacaaatttcatgcaggaaattgctagtgcatatggcaggaggagggatgtatttttagaatgatagaatctctgtggaggaagtatttatacagagatttgaaaggtgaaaggaagccagacattcaaagagctaggggaaaaatgtctcatgcaaaggagaaaggataaaagagaatcctgattttgactggagctcgatacattcatggaaaaatttaaacaaggccagtgggtctggagtacagagaatgagagggagagtgcttcaaggtgatgtgggaaagacaggtgagtgcaaggtcaggaaggctttgtcacccatgtagagacattgattctcaacttacacagagaatgaatgagagagtgacaagcggagaagcagagccaatctgaagacccctgtagtcattcaagtgagagatggtactggcttagaatagggttcctgacgtgtgtatgacaagaagtggacaaatgagaacatattttggagatagaatttacaaagctttctgatgagattaaatgtgcaagattaaagaaagggagaaattcactcacaggtgggagttgaacaatgagaacacatggacacagggcggggaacatcacacaccgggcctgtcgggggttgggggcgctgggggagggatagcagtagaagaaatacctaatgtaaatgaccagttcatgggtgcagcaaaccaacatggaacatgtatacctatgtaacaaacctgcacgttgtgcacatgtaccctagaacttaaagtataataataaacagggagaaattaataagcaaagaagaaaatatcacacaatggtaaattctgtgcatataatcaaaatatagtgataggatagtgaattagtgagaacgtgatctgaataattaaaagggacaatcttgttataaagtcttaggaaacagctactgtggcagctttaagggtaagttgggcgcttggtgtgttctagaaggagaagagaagccagtgtggtcaagcttcttagacaagaggaaaattatcagcaagaggaagtcaaggaaacaggcaggagtgcaactatgggaggctttagagctagtcaaggaacttggattttatcctgagtataataagaaggtaacttttgctactcccatcaggattttatttgatttatttaaataaacttttaagactatcgtaagccacatttagcccgaatctactcgaaggacacaggaaacaaagcaaaaatcaccagtagggcagaatcaggcattcctcttttggtgggagttcttattgtagcccaggcataggttagtatagccacccagaagtcattttctcccaggtgtaaggagtcaaaatctgtatcaggcaagtcagagagaggctgcaggttaagtcctggtgccccatagtagctaacaggcttttcagccctccatacacctatgttctagactctgcaagaaatgccttattataatttccccaaactcagggctgcccaaactatggaatctccaacaggtatttatgattcattataacttcttcccattcagacaagtttgccaatcaagggtcatttctatcacaggcaatgctgcctagtgtcaacctaaaataatggcagagagacaagcttcccaaataaattactttgttcaggaataaacaggactataacctgggatatgcatgctatgacagatcataggcatattcagggaggtggaggcaagggaaacttttaaaggcaaaaaggagaagtatatgaaggtcgttttgaaacaaaagttcattggtcataggggcttcccacagttggtgacatgtgcactgaccatagttaggagtgggtcttcatagaagtgacatgactacagggttgtggtttagtaaagctacttgcaaggccgcaattaggactattactggaaagatgtcctcgtcgaagcggcttaattgcaaggtgtggttttggcagagtctcttatgacagttcttgttatcaggcaaatatacatgaggaccctccttttatgaaggtcccaaactaaatggatcttctggctccatttagtttgattttgacatgaatgactccattttggtaccgacagttttcacactagcaatataattggtattttacagttgtctgtttttcagggaaacagagccagtaagtttaactgaaaatcagattctcatgcaacagaggagttttgttaatccttttacttatatacttcagatcacatagggcactatggtctgagatagatattagtgagcatggtgatttagaacggtttcaagtagctttcagttgggtttactactgcaagagcaaagaagcagggcaaaagttatgtgaaattaaatacacagaagagtaggtgggcgtagatccccattgcttccataattctcacaaaggtgcacataatttggtcactgtgtcctttgcaaaatggtctagcaggtcaaagggccgggattgtgagctcactgtctcttatacccctaggctaggcagggatcacatcagcactctagagcctatttgccaaaataaaaggcaattctttgcagagtagattacatattccatgttctcattactgtattatcaggaccacgggagtcctagtcacagatgggaatttaattaagatagtgaaatgaactcatttcccttggctgttaagttggcagtgggtggtgagggcaagagtggaagctgacaagctagtacttggatctgcagaagtccagggaagagattgtttagacttgtgtcataacagtactgatagggtgatagattcaggacatatttttaaggcttggtagaaagggcttgctgatggaattaacatgggacagaaggctttttgacttgtgcagttaagaggatagtggcctttaagaaggagaataactggaggaagacgcttttcagaggaatataaaaaatactgttttgaccctgctagttgaggtccctgttagacttcaagtggagatgacaagtttaagttctgggcatattcagaggaatataaaaaatactggattatttgtctaacccagtgatgtagagttgctgttcctaagtatctgtgggtgttgctgaaagccatgaatggtatcatccaggtctactgtgcagacagaaacaagagtggggcccagagctgatccaaatttataaatcctgttttcataaattcacagagatagaattattcacagaaataggtcaaagagtaaccaaaggcttgagcttaacaatttaaatgctattttgaatggctgtactatcatatctccacattaaaacaggatagggaggcactggggccaatttttcatagacatcatttaagaaaacctaggtcagaaggtcaagcagttgaactttgtgccctgtcatcccctaatttccctgtcaacttgaacttcattctagaagttcagtccctgcctttgcagccttgtactttcttggaaagttttatgttcaaatgtgtcccatgtcggaataatagctccctgacctgtgggacaatctatgattaatgcatcccaggagagtacatgcccttcatctggcctccagcccttattgaatgggggtaagattgaaaatttataaagataggataaggcctgtggcaaaacagaaactcatttagaggcttattggtcagactggaatttaaagaggagatttttcaggaggtcatcatgtttgtctattaaatctgttacctgggacctgtcaggaacacgaaagttctattgaatgcctttcccaaggacccagcatgcatggtgtatcttaagaagtaaagggtgtatcttggttacaattagtaatgtctgtaactctgaagggaatgagggttttggcaaggccttgtattgtgaccttggtatataaggagacatactgaaactaatatcgttttgacttacattttgggtatattcgtgagcaagagattctaatatgttgatttttttttaccttgaagaagacaatttgtaggtaatggcccaataatttataatacatatgaagacaggaccatttgttggccagggcatccagtgttaaggtgactgccttaagattaagattaagtgtgatgtttcttgggtcctgtcctttgttagggacatcctggctaatggatggaaagcagcaacattccactaagctctatcacctgtcatggttagcagtgccattggcatagtccaggaactaccactgctgttcactcagctaatcccaaggatcgccaaagatagctaaggggtttagggaagggtgacctcctccagcaccatggcatttggcaaggaactgagaacaggggaagctacctcttctgctggtggaatatcctatagggctcaagtttggttccatactgtcttagggaggcctcactagctgtgccaaggttgtgaaggttagtttttaaaacccaaaacataatgggcaggtgggagtggaagaccacatgctaagagtttgtaagagcccctatttcctggagagtccagtaggtaaccagtcattagttgtttcatgccattaataaacgtgtcaaatgcatttccttggaagaggatactatgaatgtgatgtcatacctatgctcctggagaaaggtgtgtatagttaagagcctctctgctaagactgtgtgtgatggcaaagctgctgagaaactccatgggtagctggcaaaaggtgtattgagttcttttgaaggtggaggcaaacgtggtgagagattgttaaaataggagtttagccacctgtagttgtctttatgttctgtctttgactgacaagagaaaaaggaagggacccagtgtctctaggcagcaaccttaaccacaggatactcagtccttctacccctcaacttgttttttatttttaatctctgttttctttgaatgcttacctgaggagatcctggtagtcccaagtgttctgatggataccctctctagagtgtcccaatcaaccttagagagcctgggggtctacatcaccaatagtggactcaattttgtcttttaaattatttattgtttgacaatttatttattttgagacggagtcttgctctgttgcccaggctggagtgcaatggagcgatctcagctcactgcaacctctgcctcccaggtgcaagcgattctcctgcctcagcctctggagtagctgggattacaggcctgcactaatttttgtatttttagtagagacgggcttttaccatgttggtcaggctttaaggaagagattattaacatgtcaatatgtaccagcacttaaaagtactcaacgcatttaccaggtgaagtgtaatttacaatgagctgagaaacatcttcaagtgtcttaggagaaacaagatcaaagaattccttctcctctctttcctttcctctctctttttttttttttttttttttttaaacattgattcaccatcttctgtggatgggatctgtgatagcccatggggttggagaccaatgagcaatggctacaaggatgcagcagagaaggtgccactggtcccagcagcattgactctaatgaagtgctgtctaggactatcctcgggaggaggaccatttgactcttggagggaggagagtgaattatcttcttctcccaagtgctattgagagcaggcagcatcacgtacgtctactgcagcctactggctccctcagctttccagctagcattcagcaatatatacacccatgaccctatgatgggggaaactccacttctagtgtcaggggatattcctcaaattataatcactcaaaggtgcactgaaaaacagccaagtcacatggccaattcaaaagaggctccccctcttgctgggatcaagttggaatgcagtatcctggagtgtgttatcgggattgggacaggatctagactttaggaaggggattcttggcagtattcagaagaggtaatacaaagccatgcaaggcagtacacaagaatgtcatcggagtagaaaggcctccaaaacagtagagccctatgtagttaggcaattaaaccatgagcggtgaaagggcatctctgagggacatttcactggagtttggaatgatcgcatttttgttgccaattcaaatcattacaacaaggcatggaaatcacactcagaaatgcataagagataaaaatttataatcacagtttctagagggaaccagaggcatgccatgcaaggggccctatgagaagaactcctagggaacaggctccatcaagcaggagagccaagagagaatgtgaacccatgggcaggtacctccattgagagtcaacgtggactacacaagcaagaagcatgaggggattttactggtacatttgaatatcactaggtcacaatcagggaaggcaagaagaggaacttgtggcaggaaccagacttatcacaccggtgtacctggtaacttggtgaggggtgggttgctcagagtctgttcatggagaggttaaggtatcaggaacatatgaagttaaaaaaaattgcaatatgccaccctgctacgctgtattttgcttacaaattttatggagaataacttttctatctcttcactttcagcctatgcgtgtccttaaagctaaagtgagtcttttgcaggcggtatatagttggatcttgttttatccattcagtcactctatatgttttgattggagaatgtaatctatttaatttaaagtgattattgataggcaaggacttactatcattattttgttaattgttttctgactgtgttgtagctcctggttcttcctctcttcttgttttcctttttgatttgatgatttcttttgtagtgatatgcattgatctctttatttttgtcttctgtgtatctactacagatttttagtttgtaattaccataaagcttgcataaaacatgagtctattttaagctgataacctaagttaaattgcatacaaaaactctacatttacttacttctcctcacctacacattttgtgttactaatgtcacaatttataacttaatacactgtgtatcccttagcaaattatcatatagatatttttaaaatttgtttttttaacttttatactaagattaaaagtgagttacacattaccattacaccattattctgatgttgactttatacttacctttaccagtgagtttcatgctttcatacatttttatgttgctaattatagtcctgtcatttcaacttgaagaactgttttcagcatttcttgtatggctggtctagtggtgatgaactcgttcagtgcatccactcttgaatatttttctccactgtagtgctagaacctctcatctggactccagggctcccacaaaggtattcttgtttatgggtagttggcaaaattggtgtttctctagggggatagcagctggaaacttctacttcattatgttgctaatgtcccttctgacagaaggtttttctggataccatactttctccagtggtatgtttggagttgtccatatcacctgctgttaaaaatgtccctgaacctttggtcagccctgacagacctatctgttctctgtttctcaatccagttaccaacctgaccacaagatgtaccaaagattttttgtattgaaataataatatttaataaacatctgctctgtgccaagcattttggcctatactttataggaataaactccttaatcttcaaaataaatctttgagaaaatatcatttcatacatgatgaaacacagtcttaaaaagggaaaatgacttgttgaaggttatgaagtgatggcagcgggatttaaaccaggcttgtttcactccagaaagtccagaatccttttttatattccttaaatagtttattggcaagttgattattgttactttattttataactctaaaaggaatatatacacgacgtaaaatattcagaagatgtcagctcctccagaaagataaagtatggttcctgtgctgaatgaagaactcagtgggtaatgtggacggagctcctgccttaagagagacaagtatgtaagtggactgggaaaggccgtcatgtgatgcttgggaaggagacattcaggtactgacaataaagtccacagaggaagagacaaagaaatggttcacctcaaagtctatgagggggaaaataatgcctggaaccatgagacatgcaaacgtggttctgaataattgttacctggaataatgttatttcttgccacacattaatgcatttgctaaaacaaagccagaaactttaatttggatatctgattccactggggatgacccaatgggaattttcagatgaattggttttgctagcaatacttgtatggtagaagttatgctgagtctggctggctgacagccagctatgaggctcagtctgtgaagtatccgctggctgggaagttctttcaaactcagaaattacaaagtatcaagtcttaatattggttgtatcctagatatactggttaaaacaaattacaatgtaaaaatatatatgaatatatgataaacaaggtaattgcagagggatctaaatgttcatgtcacttatgtctaacatcatcttctggaggtgtcattctaggcagccaaatcctaattttttagtcattgaaaattctagaatcagaaaagttaagtatatggtagcaattaatggtttaaacctaagatagtctgatgcatccaccaccataaaaataattgctgcagagatatgactttaccctagggctcctctggcctggagtggtcaacacagttctttggagacttactattttctgcttttacagttgaaatatattttctcctaagtgacaagtttccttgtcaggtatattaataccttaaatctaatagttgttaagtttaaccgacctagactcaaactgttaccttcttatgatttctcatgtctcagctctgattctcggagttgagataattctttatttatctgagagaaactttataagttcttggggaaaataatgtctttttagaatggtatagatagatttctcaaacttgagaggggaacatgatgatgactttttagaaaaaggcagatcgatttctcaaccttgatatggggaacatgatgatgtctctttagaatcaggtagatcgatttctcaagcttgaggtctcagaagtgcaagctgccttcagaccccagtgagatggggtggactaattatacatatcttcattctgttcctatatgaacaaggactcgaggccttggctgggccatggccagtgtacagcaatttagtggaagataggtgactgaaatcaatatttcctaagctagctcttaggatcaatgtcttttccattcagccatattcctttatcaaactcaaacggtaggatttttcaacggtggatcagactgatgttaaacatgtttccagataaagacattaattttgtttctgttgctgtttaaagcaaataacaaagagagtctggctgggtgtggtggctcatgcctgtaatctcagcactttgggaggctgaggtgggtggatcacttgaggtcaggagttcgagatcagcctggtcaacatggtgaaactctgtctctaccaaaaatacaaaaattagccatgtagtgggatgcacctgtaatcccagttactcaggaagctgaggcaggagaatggcttgaacctgggaggcagaggttgcagtaagtcgagattgtgccactgtactcccgcctgattaacaaagatgtaggaaccagagctcttggattccagagttggtaatcttggctctatgctgctctgtagtcagaatcaatcaattcccttggaacaggtgaacagaaagtgtgtcttgtcttgcctttacacagagaaagggaccaattaagttccaactctttgggaatttagagtctcagagagaaaaattaagagaataatctaaatcacaatgaagaaattatctattaatatatttataataagagcaaattgagtgtctctctgctgctgagaaccattgttagcacatcacaataaagtcaaataacatggagtgagatggaagaaagagaaaacagggtgagtttcttcagagctcagagggaagaatttattttttgtttttttgaattctacatatacaagaaaatgtgtgtgagtgagtgtgtgtgtgtgtttattttgtgagagagacagacttggtggggtgaggtgaattctggttctggagatgtgctatggaattggggagaacttggcagggtagttcttcagggccttaccagtgctgaattacttaaaattgaattaagagagtctccctcagcacaaattgaaacagctagacttggggataaaggaacaaatttacctaataggtcaagattctgaggttaagtcttctttgcaatttggcagttgcactgatttatgtgccaaactgtgaactcatttctcaaagtggtccaggagaaggactgtttaaggctctagcaggatcaggttcatgcagcagtctaaatgatttgcacatgctctagggctggtgacatctatctatactcaaaagctgaatttctttttagtgcataggtaaaaccatatttcatgcctttttagggaaagatgatgctgtacactgggattggtaatcagggaagtttcactttgggaaattctgcctttctgtgttagtcatttgcattgctttacttcaaacttcagtaacaattgattgagattgatccatcactatttcagtggagcctgacttatttgtaagggctgcccgtgtcttcttatctgggcctggcttttgaggccccctcgaaatgtaatcacccccagcttcctcaagctctttcagtaatcctctttgctgtctccttcctgcaccattgcctggtacctcctcctcttccaatctgttccacccctctgatcattctcctctgagcttctctgggccaagacatgactgtccctgacctgtgacagctccttgtgcatgaatttacctccacaactgaactaggagctctccatggccacagctgacacttaccctgttgtcttacccatgaacttgtgatactttttcttgtaattgcttttctaggtaaaaatactcttcgtcatgattcttgtggatgtgactgtatctgaacagcctcagtgtaatatgaataaacaagaatcaaattactgagtacctactgtgtgccagacactgtgtagacatatattttcattaccctacacattagcataatgaagacagtatttattcattaaatcaactaagactatgatacataccagtataatctctaacacttttcccataatattttgagtgcttattaattatgtgcaaggcacagatgaaatgcctagtctgatgaagtattaaaatggttatcaattcaaaagcaaataaatgaacactgcagattaagccatgcagctataaaatctagcatacctttataaatttaaaaattattagctgaatactaccaactgccagcagtcagaattgaatgcttgctttgttcctgagattataataaacacttcactaatgctgagggcagtaaagtgggatgccctaattcttgcagctagtagataaggaagtccatggtcatctgcacacagatctcataatcttcccataataaaatactggacagtgtatgagatattgtcaataaatgccataaccttaggctattagtctccctgaatgacaggcttttaatttataatgcaaataacaacaatcatctctttgaacagttggaaggagatggctggacttatttatttcagaactgagattactaaagcattattattaaaaaaggaacttggatttggggctggctcccctgaattcttaataagggataaccttataactaaaaggaaagagacctcaaaatggatgagtgtgggaggagtgaaagaatatacagttgtattaagtaccagtcatatctctagcactttaaaaatattatagaattgttatcacaataaccctgtgatgtgaggtaatgtaaaaaaagttttatataagtgtctttactagtaacgtttagagaggttacataacttcctcattttatattcatttattgagtacatgttagtcactgtcttaatttttctaacttatttatttctcactacaacattcaaagttagatgttatttttatccccatttaacagttggccaaactgaggcacagaaacatttcaaacatgctcaaggtcacaagtagaggagccaggattcaaacgcaggcactctgactttatactttgtgcttttaaccaatacgtcaatattcaaagtggtggaattcagactcaaattcattccaaaccttttctttgtttttcacttggagtcacaggagaatattcctactcttaaatccagatgcctctgaagaccaggaattgactttctccttagtaagtcacagacacttttaagacaagtgtgagaatattatcacctttctggggtattcagagttccccaaggagcctcaggaaaatagtatgttcagtgtgataattgatagctctgattcatctggctattcctcttccttccagagcttcctgccatgtcataccattcctttcacatcatcactgtgtgtccatgtaaatgtatctagacagccatcctacacttttttttaaatctccaacttctgctcagcattcatattgaagtcttccccaggtgaagcagttttagaagtcgactccgaatctccttggttctagctccatagagaataggattgagtacaggaggcaccagcacatagagattagccagaaagatgtgcacatgcttggggacttcgtggtgaccaaagcggtgggtgaggaaggagaagaaggcagggatgtagaaaaccaggatgatgccaatgtgggagccacaggtactcagagctttgtgctgggcatcatgagatggaagatgaaagactgcatggaggataaagccataggaaatggcaatgagaatggaatccagtcccatggccagcagagccacagttagcccatagacaatattgacagtgatgttggcacaggccagtcgggcaatgcccatatgctcacagtatgtgtgtgtcatgacacggtgaccacagtaggggagtcgcctcagcaagaagatgaagggggagacaatagccacactacggaatagcccaacaaagccaattctgcctatgacagcatggttgagaatggttgtgtaccttaatgggttacagatagccacatacctatcaaaggccatggcaagtagaattgaggactccagagcatagatagaatggacacaaaacatctgggccaggcatccaccaaaggaaatctcaccagcatggagccacaaaatggccagcatcttgggcacagtggtagaactgagagccaggtctgtgagtgagagaaggcagaggaagaggtacataggtgcatgaagagcattgtccatggcaatgaccaggatgagggcagcatttccaaccagtgctacaagatacatggcacagaaagggatggcaatccagaagtgggcagcctccagccctgggatccctgttaagaagaaggtgtctggaagatggttatcactgaggttggaatctgacattcttcctggcaaatgaagggctctttctgaatagtattgttatgcttgccctgtaacatcagatatttggttgatttatgtaaaacaaagatctttctgtgaaataatcttttttagactaaaaaaatttgtttttcacttgtacaaacatctgaaatgactaccacatataattcattttaaaaccttctgctaatttctatattgaacaatgatgttttgagttctatatccaaagcaccaagctaagtatttattagtcttctcaaactgacctttccagacttatctccctccatatcctgcacatcatttattgacctctagtccatccacatcatgggatatttcttacctctcattcatgccttttctcttacctagggagtctcattcctttattttcctcctctctattaagttttaatacaagtttccctgcttcccagaggccttccctttctaaactggtcttggtaatctctaattttgtatttttcctacttccactatcttacaaaattctgctgggttagaactatgtctttatgcaaccgtaacctctacactgcccatgactgtatttgtacctagacattttgacaacttcaataaagactaaattctgatcattcttagtaacatggcattgatgttttaaattaatgatataatgatgcattaactttttttctgcatttgttatgtgccaaatatacaccaaatcacttttgtatatatatatcatctgaagtgcctatgaagaggctaggcaacctgaatatgctttcatatcatgattgaatatatacagcaatttgagcattcacatgggtataccagaaggaagtgtgaggtaaatcagatatgcttgttgaggatactgcactcaaccatgacaaagccagcgtatagtcctccaatccaccactataatggctggctgtgaggtcagatcagaatggcaagtgctattagagacagatataaaaagtgaggtattctggatttaccacccataaagggactggaaggggattctgttcttgctgtagagggatagctagtattatacacattgtctcagtaacatgtatccctaaaagaattctgagtagaaatgccaggaaatctgaattttagccccgattctgtaacattattgatttgtgactttgaacaaatctcttacttatctggacagtctcaatttagaaagggcaatgaatgtagtcattctctgattttctgtctgctcactatgtggcattgaaaaaaattccaaagcctttttgtggcttagtttttatctttaaattgggaatgacaccatctgacctaacttcacaaaattttgtggttgacaaaagatgactattcatggaattaaacatttgtatacccagaataattcccctattttttcctaaaaaaataagatatttatattttaacaacatatactctcgataaaagagagtacagttatcatttacatccctaaccaatgaaaagaccaatcccagagaagtgaactgatataatttagatcacgaggcattttatttgcagaactatgattaggtctcatgtcccttgattcagagtttggcgtttttgcctcaccctactgtccattaataagtccaatacttgaattcctatctctttcaaatgaggctaatatcttttttgtctaatatcaattcctagtgctgaagtatctttactcattatcttagctccaaagaggtggaattaggaagtcccctttatttgcattgagatttttttttttgtaagaacaggaggcatcttattgattcctaccataacagagcacctaggactgtaatacaaagaaacacgattttactgcagtaaagataactgatgaccgatggtgtttaggaagttatgagacaaaagatacagagcaaacaaaaagtcatgggcatcagccagtgcagggctgtgctagaggttcctatctagcccagacacttagctcatctgccttcctaccctctgctttggtttaaaatgcagaggagagactggaaacaatgatgaatgcaggggcggggatgcccattgtgtgctctgtagatgtcttaggcaaacttagaagctaaagagctgcttgtggctgctcaatctcagaagtgagtcaagaagtttccagagaagctctcccaaagcagagtcttacattttcgtgtcacatgcccccacatttcttccctctcctcctcctcaggtctccagtaacccaacagtatttagcggcacataccatggaccagtcactgtgtggaactggggtaacagcaatgaacaatcagacaaaaatccctgccgtgaaagagcttagattttagcaaaggcagataaatagcaaacaaaatgcagaagtaaaatatatgttagataatgataaggactttgaaaaaataaaacagaaagaaaaagaggtagtgggagtggggtaaattctaattagggcattgtattagtttgctagggctgtcaccacaaagcaccacagactgagaggtttaataacagaaacatattctctcacagttgtggaggctggaagtctgatatcgcgatgttggcaggtttggttctttgtgagtcctttctccttgccttgtagatgacccccctttgtgtcttcagttggtcttccctctctgcctgtgccctcatctccccttgttaaaaggtcaacagccatatcggattagggcacatcctagtgaccacattttttaaaaaaactatcacatctttaaagatcttatcattaaatacagtcacattctgagatgctgagggttaattaagaccttgacatatgaatttgggggtgtggagaccaacacaattcagcctgtaacagacatccagggaaatctttgctgggaaggtagtatttgagcaaagccttgagtcaaaagagctagccatgcagatctcagaaggaagaacatttcagacagggggacagcaagtgcaaaggctttgagacataggcctgcctgatgggtttggaagcagcaaagaggcttttgtgctggaggactagaagtgggggtgcaaggagcataggcaagataggctagatccttaggccacagaagggactttgactttcactctgagttggagggggatccttaagggagaaatcacattgctggtgatctgcaagttcaggctcaaattcattgctcagcccaagcagagtccatcaggtgcttatgctgacggcaccagggatgcaaggctgaatagctggagaaacaattaacacattttttgtgggaaagatacatctatttctagagctctcactattataacttctgaacgttgcctcaattcttgatattattactgttaaccttctttttgatgcacttagaaaacgtgagaggaaggttatttttatgtcatatgtgctttggtaaaattttgcaggatttgtgtactgtgtattcttttatcctttttcttttgctgggctaagagtgaaggggagaacagcagagatctaccttccatcacctttggtggaggggtgctatgatgggaaatctgcttctgacttattcttttgaaatcatagttagggtaccatattctttgcaggttatgtagatgatgtacttttcattgccagagaaagagtagccaatctgtataatgccagtttgtcaaatctgaaagtgctaaaatcaaccaaaacctataaagctatgaagaatattgatactgtataacatgtattggagcataaaaacttttttaaaaggcaggtttattctcacattgcccataataatattttgaaataatacatatgtaatgtttgtttatttagccagaggcaagttggtactgtggtaataccgtcgggtttgttgttcaaagacaagggccaaggcccaggtttgctacttcctggctttgtgtccttgggcaggtcatttaacctctcccattggtaaaccgaagaagacaagtcctcctctacttctgacagaagtattgggaagatcaagtgaacacatgtctttgtggagtactatataaaattagatattatcataatgcattgcactgatattttttagtgatgacactagatggttttgggctcagcattggcactgacctgtgttaataggggaaacaagcttggacgacagagtctagagagctggaatcactaccatcttcttttctcctttctttctggcctattcttgccctctaagaaagctttaaaataactgttgtaaggtaactgctactctgtgattatctaaggatgtgtggaccagaaagattgaggcaggagcaggtcccatttatttccctttagaaaacagtgggaaaacgatattgaacttgagtatcatttaggttcacaatacaggcacccttcctaacttgttgcaggatcctgtgtctgggtccccatcttacacctagatgtcagtaacttagctgtgagttcattgactgaacatattgctgaggaatctgatttcaagaacttacctgcacaagagacatgagtttgcaggtggagcatgcagaagttggacctcggtgtaaaggtgtgtgtatgagggtgaaactgtgtgggagaaagagtgtggtggtgcagtggctttggcaggaggtgtgtgtctggatgcaaagttttgtttagggaagtgaaggctgtgtttctctgcaggttcaagggagtatggtatgagagagtggagggtctgaatgtgtaattcgtgttgaaatgtcttgtcctttctcagttttctgggctaatgtcttcagttcagctctgtatttctgcctcctctagtcaaggggattggtaaacggggttatttattgactttctgtgatgtgcaggtgggaaaacccaggtggcatcccctaaggatttgatctgtggtccatctattgagggaaagataagaagcagttgataattgagaaaaaaatgagcaagggaaattttccagtgagttttcaagggaatttgaaattaaacagctagcctgtcttttcctctattctgatctctttttcacttctttccttgtcttccttttctcttctttttttttttagctgtactttctactctttcttttcttttcttttcttttttttttaattatactttaagttttagggtacatgtgcacgttgtgcaggttagttacacatgtatacatgtgccatgctggtgcgctgcacccactaactcgtcatctagcgttaggtatatctcccaatgctatccctcccccctccccccaccccatcacagtccccagagtgtgatattccccttcctgtgtccatgtgatctcattgttcagttcccacctatgagtgagaatatgcggtgtttggttttttgttcttgcaatagtttactgagaatgatgatttccaatttcatccatgtctctacaaaggacatgaactcatcattttttatggctgcatagtattccatggtgtatatgtgccacattttcttaatccagtctatcattgatggacatttgggttggttccaagtctttgctattgtgcataatgccgcaataaacatacgtgtgcatgtgtctttatagcagcatgatttatagtcctttgggtatatacccagtaatgggatggctgggtcaaatggtatttctagttctagatccctgaggaatcgccacactgacttccacaatggttgaactagtttacagtcccaccaacagtgtaaaagtgttcctatttctccacatcctctccagcacctgttgtttcctgactttttaatgattgccattctaactggtgtgagatggtatctcattgtggttttgatttgcatttctctgatggccagtgatgatgagcattttttcatgtgttttttggctgcataaatgtcttcttttgagaagtgtctgttcatgtccttcgcccactttttgatggggttgtttgtttttttcctgtaaatttgtttgagttcattgtagattctggatattagccctttgtcagatgagtaggttgtgaaaattttctcccattttgtaggttgtctgttcactctgatggtagtttcttttgctgtgcagaagctctttagtttaattagatcccatttgtcaattttgtcttttgttgccattgcttttggtgttttggacatgaagtccttgcccatgcctatgtcctgaatggtaatgcctaggttttcttctagggtttttatggttttaggtctaacgtttaagtctttaatccatcttgaattgatttttgtataaggtgtaaggaagggatccagtttcagctttctacatatggctagccagttttcccagcaccatttattaaatagggaatcctttccccattgcttgtttttgtcaggtttgtcaaagatcagatagttgtagatatgcggcattatttctgagggctctgttctgttccattgatctatatctctgttttggtaccagtaccatgctgttttggttattgtagccttgtagtatagtttgaagtcaggtagtgtgatgcctccagctttgttcttttggcttaggattgccttggtgatgcaggctcttttttggttccatatgaactttaaagtagttttttccaattctgtgaagaaagtcattggtagcttgatgggaatggcattgaatctgtaaattaccttgggcagtatggccattttcatgatattgattcttcctacccgtgagcatggaatgttctttcatttgtttgtatcctcttttatttccttgagcagtggtttgtagttctccttgaagaggtccttcacatcccttgtaagttggattcctaggtattttattctctttgaagcaattgtgaatgggagttcactcatgatttggctctctgtctgttgttggtgtataagaatgcttgtgatttttgtacattgattttgtatcctgagactttgctgaagttgcttatcagcttaaggagattttgggctgagacagtggggttttctagatacacattcatgtcatctgcaaacagggacaatttgacttcctcttttcctgcttgaataccctttatttccttctcctgcctaattgccctggccagaacttccaacactatgttgaataggagtggtgagagagggcatccctgtcttgtgccagttttcaaagggaatgcttccagtttttgcccattcagtatgatattggctgtgggtttgtcatagatagctcttattattttgaaatacgtcccatcaatacctaatttattgagaggttttagcatgaagggttgttgaattttgtcaaaggctttttctgcatctattgagataatcatgtggtttttgtctttggctctgtttatatgctggattacatttattgatttgcgtatattgaaccagccttgcatcccagggatgaagcccacttgatcatggtggataagctttttgatgtgctgctggattcgttttgccagtattttatggaggatttttgcatcaatgttcatcaaggatattggtctaaaattctcttttttggttgtgtctctgcctggctttggtatcagaatgatgctggcctcataaaatgagttagggaggattccctctttttctattgattggaatagtttcagaaggaatggtaccagttcctccttgtacctctgttagaatttggctgttaatccatctggtcctggactcttttaggttggtaagctattgattattgccacaatttcagctcctgttattggtctattcagagattcaacttcttcctggtttagtcttgggagagtgtatgtgtcaaggaatttatccacttcttctagattttctagtttatttccatagaggtgtttgtagtattctctgatggtagtttgtatttctgtgggatcggtggtgatatcccctttatcattttttattgcatctatttgattcttctgtctttttttctttattagtcttgctagcggtctatcaattttattgatcctttcaaaaaaccagctcctggattcattgattttttgaagggttttttgtgtctctatttccttcagttctgctctgattttagttatttcttgccttctgctagcttttgaatgtgtttgctcttgcttttctagttcttttaattgtgatgttagggtgtcaattttggatctttcctgctttctcttgtgggcctttagtgctataagtttccctctacacactgctttgaatgcgtcccagagattctggtatgttgtgtctttgttctcgttggtttcaaagaacatctttatttctgccttcatttcgttatgtatccagtagtcattcaggagcaggttgttcagtttccatgtagttgagtggttttgagtgagattcttaatcctgagttctagtttgattgcactgtggtctgagagatagtttgttataatctctgttcttttacatttgatgaggagagctttacttccaagtacgtggtcaattttggaataggtgtggtgctgaaaaaaatgtatattctgttgatttggggtggagagttctgtagatgtctattaggtctgcttggtgcagagctgagttcaattcctgggtatccttgttgactttctgtctcgttgatctgtctaatgttgacagtggggtgttaaagtctcccattattaatgtgtgggagtctaagtctctttgtaggtcactcaggacttgctttatgaatctgggtgctcctgtattgggtgcatatatatttaggatagttagctcttcttgttgaattgatccctttaccattatgtaatggccttctttgtctcttttgatctttgttggtttaaagtctattttatcagagactaggattgcaacccctgcctttttttgttttccatttgcttggtagatcttcctccatccttttattttgagcctacgtgtgtctctgcacatgagatggatttcctgaatacagcacactgatgggtcttgactctttatccaatttgccagtctgtgtcttttaattggagcatttagtccatttacatttaaagttaatattgttatgtgtgaatttgatcctgtcattatgatgttagctggtgattttgctcgttagttgatgcagtttcttcctagtctgaatggtctttacattttggcatgattttgcagcagctggtaccggttgttcctttccatgtttagtgcttccttcaggagctcttttagggcagacctggtggtgacaaaatctctcagcatttgcttgtctgtaaagtattttatttctccttcacttatgaagcttagtttggctggatatgaaattctgggttgaaaattcttttctttaagaatgttgaatattggcccccactctcttctggcttgtagggtttctgccgagagatccgctgttagtctgatgggcttccctttgagggtaacccgacctttctctctggctgcccttaacattttttccttcatttcaactttggtgaatctgataattatgtgtcttggagttgctcttctcgaggagtatctttatggtgttctctgtatttcctgaatctgaacgttgacctgccttgctagattggggaagttctcccggataatatcctgcagagtgttttccaacttggttccattctcctcatcactttcaggtccaccaatcagacgtagatttggtcttttcacatagtcccatatttcttggaggctttgctcatttctttttattcttttttctctaaacttcccttcacgcttcatttcattcatttcatcttccattgctcataccctttcttccagttgatcgcatcggctcctgaggcttctgcattcttcacgtagttcttgagccttggttttcagctccatcagctcctttaagcacttctctgtattggttattctagttatacattcttctaaatttttttcaaagttttccacttctttgcctttggtttgaatgtcctcccgtagctcagagtaatttgatcgtctgaagccttcttctctcagctcgtcaaagtcattctccatccagctttgttccgttgctggtgaggaactgcattcctttggaggaggagaggtgctctgctttttagagtttccagtttttctgttctgttttttccccatctttgtggttttatctacttttggtctttgatgatggtgatgtacagatgggtttttggtgtggatgtcctttctgtttgttagttttccttctaacagacaggaccctcagctgcaagtctgttggaataccctgccgtgtgaggtgtcagtatgcccctgctggggggtgcctcccagttaggctgctcggggttcaggggtcagggacccacttgaggaggcagtctacccgttctcagatctccagctgcttgctgggagaaccactgctctcttcaaagctgtcagacagggacattgaagtctgcagaggttactgctgtctttttgtttgtctgtgccctgcccccagaggtggagcctacagaggcaggcaggcctccttgagctgtggtgggctccacccagttggagcttcccggctgctttgtttacctaagcaagcctgggcaatggcgggcgcccctccccagcctccctgctgccttgcagtttgatcccagactgctgtgctagcaatcagggagactccgtgggcgtaggaccctccgagccaggtgcgggatataatctcatggtgcgccgttttttaagccagtccgaaaagcgcaatattcaggtgggagtgacccgattttccaggtgcgtccgtcacccctttctttgactcggaaagggaactccctgaccccttgtgcttcccaagtgaggcaatgcctcaccctgcttcggctcgcgcacggtgcgcgcacccactgacctgcgccgactgtctggcactccctagtgatatgaacccggtacctcagatggaaatgcagaaatcacccgtcttctgcgttgctcatgctgggagctgtagaccggagctgttcctatttggccatcttggctcctcccccaatacatataaattaggtttgtaataaactgagacagaaagaggatagattttgagatgaatgcaggcaggaatgctcccaggaatgaacctgggagcttcaaggaggtgagcctcaaggtgaccggtaggattgtggtgcccactggttccccactgaggtgctctccaagtgcacctctgtgctcatctcaagggataagtgtttctctttcctgtcagagccattttctccagatgtggttattggctgcaaagggcccaccatcactactcatggggcccccaagagactcatctcccctggcgctcacgaaattcagttgatgagtttggatataagtatacagccatgaaaccatcactacaatccatatcataaacatatacatcacctctaaaagttccttcccactctatttatttatgatgatgaaaacacttaagatctaccctctcggcacattttaaaatatacaaaacagtattgttaactataggcattattttgtacagtagatctttaggacttattcatcttgtataacggaaactttgtaccttttgaccaatatcttcctgtttttcgatggcctgttaatgtgctaggtaaacttcagaggatattttactttacctagctagttagctatctaactctgtaacatatcagcaagctaatgatataggtaaaatattattcttgttttacagctgaagacactgaagtgtaaagaacagattaagtaacttgtctaggataacacaactagtaagtcaaagaacagaagatgaaactcacatagtctgaatcccaaatccaagactggtattattttgggttggtgacatcactgtgaaaagtcttacagttcttgtccttcctcttatcggcttgttcagtgtaaatacatgaaatactgatggtctcagtttaggctggagacctaagagataccaagtcacaaaggaggctcattctttcatccagtgactattttttgggcacctaaacatgtcagaccccttcagcatggaagggaatccttggagtatgatacaaacaggcatttaccctctgagtgcccccttgtggccatacagcataacagctaagagtacctaggttcaaatgctggtgttgtcacttgtgtgatttgtgactatagataagttatttaactcacagtggctccattttgatatgcaaaatatgaatctgtttcataatgttttcaaatttaaacgagtttatagaattagtcaacacataaagctctcaataagtatacatgaatgttattactggggggaaatagttataatccactgagatgtcatgattactgtctgtggtatccaagaaaaggattctctaacacagcctatagagctaaagatttctctactgcgcatggacttggattaattaaggtagaaaagtgagtaaatcactttatgaggattttatgtgaggcatgaagagagggtttggactggaattcagtttcatctaaaaagaatcaagcctccagtgtggtccatgctacaagatggtactgtgaggctgctatggatctagatacaatggcaaagaaacataggttgaataggtgtatgctagtcacatgtaccctaccatgtgtgtcatccaattttgcaaaagcttgtggaaggaatgctgatgctgttatgctgatggttttggttatggcaaaaatattagttgtatgcctaatatttgctaaacatcatgctgggtgccttgaatatattaaagaataggagagatggtcatgtttcatggaatttacataataacatagaagaaaggcaataaatgcatacttttccatttatgttagatcatttaatcataactctgcaagatgttagacaagatcactagagaatgttatgtaagtattagtagatcctcattcaggctaaggggttagggggatccataaggcagtaatatttaaataatatttaatatccaccaagagttggtggataaataactagcccagtgaagggaaagtgcatggggaaaagcttccaggacatgtgaaacagcatttgttaaggccttgaggttggagtgatccttgcatcttcgaggaactgaaaggaggtcattttggttggaacagaacaagagaacaatgattgaatatattcaatgtaaagttgaaaatgaagatcatattacacagtgttttacaggcaatatgagtgttcggattttatcatcatgaaaatagcatgatgaaagttgacttaatattgatgtaatatggagaatgaattagaagagggctgaataatgtggggaagtccattaagatgttattgaaatgttgatatttgggtctagagagtgactgtaggactggtaagacgtcagtaaagcagaaaaatattcaggatttggatccaaaaggatataatatttttgcaagtagagttcataagtcaaacacctatttattgagcttactcctccttttatctggccatttctagtttatctttctggtctcaattaaactaattttccagattattttagttcttctccattaaagtggttcctattcctaccaccccaaacttactctctaaagcaaattaatgcatgtaattatttgtttagcctgttgtcctgatcactgtgagatttgagaaaatgcttatcctgttcactgtcatacctgagcacctccttcagcgtggttttttctctcaaagatgagtttacactaaccaacacattgaaatgtatgtgtgatgttattaatttccaatgagaaatagaattattgcattggcacaaattatcttgtcaacttgaatagtaaacactacctggggagaaacatatcatgattatatttctgggtaaacaacaaacaagaggaaaaggcttaactacaaaattcaaaaatttcgtgtcttaagtttggatagataaatatcaatctccaaaaacaatttattaattggttaaattattaatttgttaaaaaacagttcattaaatcatggtacttagcaggctagtagggtcttctctatagacctgcttgattattgttgtccttcaagtctcttgtgttgttcgcctttatctcctcctgtaagtggtgattttatgtgtgtgtgttggggggagtacatctgtttataatcatgaattttaatcctggattgaaatgaaatcttttctcaaccaataattttatgatatggcaagttgtgtaatctctttgaatttcagatatttcatctacaaaaggtgaataaaaatactcataggtgctttgaatattaaataatgcatatgaagattgttgtaagtttatggtatgtgcttggtcatcaataaatagtaattattttccatggcttatatttgtaattaggttaaatcagtcaaatctcaaatgtttgggaatcattgtttcctataagggtgtctttttatgtccctcttctgatgtcttgtgatggaattactgatgaattctaagaaggcagacttatttttctcatttcctagtaactacaggtactttcccgtgcacactctctccccattctcatgcacacatttacacacacacacacacacacacacactcattttgtaatttaaaacaattaaattttttgtcctataatttaaaacagttgtaaaatttccaatgaagttctagtttttcatgaggaagtctttgatgtgttttaaggcatcaaatattacacacatatatttataaagaatttgaatactcttctgatgctctaaatgtgtatgcttatttttccattaaataattccatattgctttcaagtatgataaaatgtattcataaggttttcactgataactaaatgagctaactgtgtcaaaaaacctagcagaatcacagatacttagtaaataaatattgttctcacattaactcttcagccaagataaatgcagataatttgggtctgcatcaggataattataattatctaacactgtttgaactctgtacaatttctaactctttaaataatttgtctgtgcatatcagcaagcttcttaccccttaaagccttcatttcttcattatgaaaggttgaatgtgatacaagatggccccgacatccttttacaaaatttaagacccttacattagtttcttaaaagtcaaacacccctcagactcctccaaaactccagagtcaacaggcatttgcaccccttattcaagattttttttctggcatataaaaaattggcaagtctttatgatagttcttgtttaataagtgtttacaatgtgatactgtttcaaatatgccaagatgtgtaggaatttgtgtatcattttacaaataaggaatttgaaacatgaacatatcaactaattttcttaatgacattcatttagacagggaaggagcttgttttgaatccaggtctggcagtagggtggcaagttgttatcagcttgccaaaactgaggagtttctcctaatgcgggactttcagtgttaaaaccagtacaggatggggcaaacaaggatggtcaccttatttgatgactctaaataattaggctcctctccgttgtgccctttgacttcttgaaatgcatttaagttgtggtatgcttactggaaagaaccctaatctgagaatcagtgagaatcagtggtctaggattcagttcagctctgttattggcttactgaatggattcttcctgggcgtcagctctcctacaaaatgaggagctgaaaatgttgatcacttcaggacaagccagtcttcattctcaattcctttgaaacttctaagtgggagaaatggcagagcacagaggagtccttcactcaagattttttagaatccctgctgcccagctacctcttggagcccttggacttagcagaaccaggggactctgaagacgcagctttatagagctcagagcagggagtgggtggaggctggcagtggggctgtgtgcagtgtgtgcagtacttggtatttctcccttcagtggacacttcaccagcctctctcctcccacccaccagagctaccctgaggaggtaagtggggacctcatctcttcccccacagaggccctcaggcacctccttcatagcttcgaaatcctttagtgattagggtacagggatttgaaggagagacagtctgtgatttaaggtaatttttattttcctacactccatttctctccccacatgcacatcccccatctagttggtgcctgaactgccactatgctggcttcgtgcttggagcttcactgtgtggttctgagcgtgtacagctctggctcagaggtgcatcttctgaagcctttgtttggtgtgaatgcctcagtgcgattaactcatatgccaatattctcatagatggtggataaaatggtgaaacaaaagaagggaacctttgattgggaaactgaatgtgggaagacagtttggagatgggatccggaactttcagcccctcaatgtccctctttatcacaactttcctagttgccatttattcagtacatcttgtgccgggagtctgaataagcaccttcaatgtttactttgcattactctttctattctagagatgtgaaaataagacgtgaggaagctaagtaaattcacagcttgtatgtagcaaaagtgaaataaaaactcagttattagatgctaggggagctatttttacttacctaaacaattttacagtaaaaacatgtagctcttatgttaatacattcttcctgttaataaaatgttttatttgatcaattttttttttttttttgagacagagtcttgctctgtcacccaggctggagtgcaatggtgcgatctcagctcactgcaacctccacttcccgagttcaagggattctactgcctcagactcccgagtaactgggattacagtcatgtgtgaccacgcctgggtagtttttatatttttagtagagacggggtttcaccatgttgtccaggctggtctcaaactcctgacctcgtgatccacctgcctcggcctcccaaagtgctgggattacaggtatgagccactgtacctggcctatttgatcaatattttaaccattaaaactagaactggtaatctctgagtcctagtctagggctctctatgccctgtcacttgcctaagcattgagaataaaatgagaagaaacacagacagttacagggagttataaatttttggggaaacaaagatactaatcaaataactaaacaagtacataataaatgcactaaaatttaagctgtgataagaaaagtcacaaagaagaatatgtgtgagtatgtacagcagccaaaattatgagaagaaatgaaatgaatgatcagaattattggaagacgacaagttcttatgtggtcttgcagcttctatgatccatggtaaggacttgaatttttatttcttatttcataaggtaagtgaagccattgataggtttctagtaaaagagtaacatcactttatattaaaaacaaataatttggttgctttgtgtcgaatgaattagacagaggcatgatactaagctgggtgatcctcaggaaggttctgcagatattttggttgaagatgttgagggatgagtgacagttggaagtgagatggagagaggaaaccagcgtttacgatggattaatagacttgtaaataggagagggtgagaaatattaagaatgacttccagggttttctggcatgaccacgtgaatagatggtgactggtgatgagatgataactttgaagaggataaaacatgataattgacataaagttcaattttgcacattatgtttaagatgacaatgaactcttacatttggaagtccagttggaaattggctgcgtgaatacatattgagaagagaagcctgggcagcagacatatatttgggataattgaggcacagagcagagacatggaggacattatgggtagacaataatttccaaggtattagttgtgaaagtgagtggaaaatgggtgattactcagaagaaatgagggggcaattaagaggtttgctgaagtttgtgattgtttgttttctacgatagtaactcccaaaattgatcctcggggggaagaagtgataatgggtgggacatatttgaatgctgataggagtgacctaaattcctgatactcacacttggctgcacacgggaattgcctatgagtttaaacacatgctgatttgtgagttctacttgcacagtgtcaaatttaattggtataggtttcttctgaggaaaggaatattttaatgcttcttaaaataatctagcatacagcacaatttgagaatctgtggtctaaacagagattaaaacaaaatccatgttaaaatatagaaaggcaaaaccaagagagtcaggtgtggaggaatgtgacattctggacccttggtgaataagtgaggggttcaagccacaaggaaaaggcagagaactgaaataatgcttgagtataggcaagagaggagagacagcttagaatatacacaaaagatgtcatcacttgcacaagacagaatcaatcagtgggtgggaatattaaggaaagacttcatggaggacatggtgcacctcacttatggaagaaactgatggctatgacccagtagagagaaaggggaaatcatttttcaccattagagaaagacgtcaaccaatgtaaaaaactatatagacacaagaaaaataaaggataatatctaaaaattagtcaaaggtttctatggggaagaacctggagctcatgacagatctaagggtgctgccaggctatagaaggtctgaaatgtaatctggttttttttgaactttccaaatctttggcactggaatctaagcatcattgtctctcctagttttagatatcaaccactcctagtcttcacttctcccaccatctcacctcaattcacccaggttgcgtttgcctaaaagtcactcagaaaccctgatggggggctttgggactaacatctcaagtactaccagcttcactctaacaggcttccctgagatgaagggtctggagcactggctggctgcccttctgctgctgctttgtgctatttccttcctgggcaacatcctcatcctctttatcataaaggaagagcagagcttgcaccagccaatgtactacttcctgtctcttttttctgttaatgacctgggtgtgtccttttctacattgcccactgtactggctgctgtgtgttttcatgccccagagacaacttttgatgcctgcctggcccagacgttcttcatccacttttcctcctggacagagtttggcatcctactggccatgagttttgaccactatgtggccatctgtaacccgctgcgctatgccacagtgctcactgatgtccgtgtggcccacaatggcatatccattgtcatccgcagcttctgcatggtattcccacttcccttcctcctgaagagactgcctttctgtaaggccagtgtggtactggcccattcctactgtctgcatgcagacctgattcggctgccctgtggagacactaccatcaacagcatgtatggcctgttcattgtcatctctgcctttggtgtagattcactgctcatcctcctctcctatgtgctcattctacattctgtgctggccattgcctccaggggtgagaggcttaagacactcaacacatgtgtgtcacatatctatgcagtgctgatcttctatgtgcctatggttagtgtgtccatggttcatcgatttgggaggcatgctcctgaatatgtgcacaagttcatgtctctttgtacctccaatgctctacccaattatctattccatcaagactaaggagattcgcaggagactacacaagatgttattgggagctaagttctgatcaaggaaaactgtcctggaaaggcttagagtttctttgttgttgctgatgtttgggtgtaccaggttagtccttcggagcctttcaatctccctccagacgtacacctataattgtgtacctgccagaagttatatgggttagccaggctacaacttgtaacgcaaaacatcaggctgccctatgttgtaattaactgtcacaggttgccacaagtgacttctctcagacccaacaagaaagagagtcttgaactgaatcctttttgtcccaatgtactaataacatctatgctttcaagtaattctcagaaacagacaaaaactaatgcatacattcgttatataatgttataatgtagattatgttacctgagatcatatcaacccagaatatttaatcattctgaatatctttaaactcaaaaactaaagatatgtaatagctgtgaccatgtttacacttctgaaataaataagaataatccagagttctgtaaaatggaacaaaaatagaaaccatacaacacatggaattcagaagtttagtacaaagaaaaatgttttatagaaaagtcacatgctgtcatcattgggcatgactacagagaggattgaatgactagaggcagctaatcaacactccaaatcgaagcctaacagaggttgttgattgatgggctggcaagtccacttcagtggcagtggttgcttggcagcatagttggctgaaatatgggctcgtgtcctgcagtgagcaacccagacaacaagcttaagcacatgcctgagcagaagagggatagctgaaggctgtcagcaaattcacagagaaagccacaaagaaagaaatcctctgaaaaaccatgccaagaagacacaacccaggccacacaggcaggtgcacacttaacagatttaaaaagaatgatatgtggactttaactggagagtaaacagttagtggacaggccatggcataactcaactccaatggatgattagggaatgaagacatgtaagaagaaaattactttttaaaaagcaatagctaataattttttttcctcataggatcatggaataacttttttaaaataaagccatagggatcaaataacatgatcatttactaaacatagttgcagtatagacttgaatttctcccaaacaccccctgaacgtctcattaagcaacgaggagagaaaagcaaaacaaaattaaaacttacagatgacatctttggcaaaatcacatgacagaaaaatcttgcccccaattggagaggactgtatactaagcaaaaatctgggcatatggttttgagattgactggtgaaactgggaacaatacttgcaggctctaagtgctcataaacataagaggataaagaagtgctgtggtggtcctcagcatttgaaaatctcaaaaatgtccagcaaatgagctcttccaaaaggatatagcctcagcccaaaggaaagtacattaagcaaataaagatccacttgcataagagagaaagaaggctctgatcgtagaggaaagggcttagagaaagcagacacaagaaagtgatgcaacagctaaatacagcttcccaaaacctgtggcgttctggggctggaacagaaggaagcagaatgtcctcctggaccagacttcgctctgacacacagaagtggcctcaaagaaagtgctactttgagccatttgaacagcaacagagggacccctagagctgcaaagctataaaagctactctgccattgcctctcccttcagaggatcccacaagtcatcccagaaagctatacttacttatatagagagacaaaaaagagatatgtgctaattctatacacagttatgagcaaaaataaaagacatcaatgacaaagatgaatccatggcgctcagggccatgctgatgatagcaatctccctcctttttgtttcaagtcttttttttattaatgctaacatttcagtgtctgcatctaaatatcagaaaccacattactgacttcaatattttttaggcttttaaaaaatgcgtcctttcatttccacagtaaaattgggaattctcataataaggcatatgaatgggaagagcgagtacttctgcaacactaaaaagtattcctatcatttatatcatcacatatatgtaaatatagatatagttttactattgtctaatgagtattgcctaattccctaattaacagacttatgaaaaaagcctcatctttatgaaataaaatatatttgttcaaactggtaatataaatattttacagtgtattgtcgtctacgtaaatgataaattatcaaccttcgcccactttttgatggggttgtttgtttttgtaaatttgtttgagttcattgtagattctggatattagccctttgtcagatgagtaggttgcaaaaattttctcccattttgtaggttgcctgttcactctgatgatagtttcttttgctgtgcagaagctctttagtttaatgagatcccatttctcaattttgtcttttgttgccattgcttttggtgttttggacatgaagtccttgcccatgcctgtgtcctgaatggtgatgcctaggttttcttctagggtttttatggttttaggtctaacgtttaagtctttaatccatcttgaattgatttttgtataaggtgtaaggaagggatccagtttcagctttctacatatggctagccagttttcccagcaccatttattaaatagggaatcctttctccattgcttgtttttctcaggtttgtcaaagatcagatagttgtagatatgcgtcgttatttctgagggctctgttctgttccattgatctatatctctgttttggtaccagtaccatgctgttttggttactgtagccttgtagtatagtttgaagtcaggtagtgtgatgcctccagctttgttcttttggcttaggattgccttggtgatgggggctcttttttggttccatatgaactttaaagtagttttttccaattctgtgaagaaagtcattggtagcttgacacttctcaaaagaagacatttatgcagccaaaaaacacatgaaaaaatgctcaccatcactggccatcagagaaatgcaaatcaaaaccacaatgagatatcatctcacaccagttagaatggcaatcattaaaaagtcaggaaacaacaggtgctggagaggatgtggagaaataggaacactttttttttttttttttttttttttgagacggagtctcgctctgtcgcccaggctggagtgcagtggcgggatctcggctcactgcaagctccgcctcccgggttcacgccattctcctgcctcagcctcccaagtagctgggactacaggcgcccgccactacgcccggacaattttctgtatttttagtagagacggggtttcaccgttttagccgggatggtctcgatctcctgacctcgcgatccgcccgcctcggcctcccaaagtgctgggattacaggcgtgagccaccgcgcccagccaataggaacacttttacactgttggtgggactgtaaactagttcaaccattgtggaagtcagtgtggtgattcctcagggatctagaactagaaataccatttgacccagccatcccattactgggtatatacccaaaggaatataaatcttgctgctgtaaagacacatgcacacgtatgtttattgtggcattattcacaatagcaaagacttggaaccaacccaaatgtccaacaatgatagactgaattaagaaaatgtggcacatatacaccatggaatactatgcagccataaaaaatgatgagttcatgtcctttgtagggacatggatgaaattggaaatcatcattctcagtaaactatcgcaagaacaaaaaaccaaacaccacatattctcactcataggtgggaactgaacaatgagatcacatggacacaggaaggggaatatcacactctggggactatggtggggtgggtgggggggagggatagcattgggagatatacctaacgctagatgacgagttagtgggtgcagcgcaccagcatggcacatgtatacatatgtaactaacctgcacaacgtgcacatgtaccctaaaacttaaagtataattaaaaaattatcaaccttaactttctaattctcagatttttgtgttaaaatcacccaatgcattttgtgttcacaatatatttgctttttcaaatatagaaaaacccacttggcaaatgattaagttctactctgtttaaaattcactgaataatttgtcccagtcagagacattaggtttagctattaagactaattaaaaactgactgccagtcatagttgcttattgtctgttttccatcataaaaaagcaatttccccagcttgtagttctggggtatttgccttaaatacatagcactgtggttggttctaagctgttgttctgtcctcatacagttgacatgaacattaacacgtccaccagtaacacactgccctcacagtgcagccattcaaatcatggtgaggctttgtgagaaggaatttaaaagcattttaaaaggaatatttggttagcaaacaaatctcaggatatgttgacatatccctcctgtatctctttagacaggtttctcccataaaacctaatgactaaatcccagggtcactgagtccttcaaatgtaacactgggattggcaaatagtaggtttcaataaatattgtcttgtgaacaaaataaatgaatgagctgttatattccttataaacaaacaaacaaaaacctaaacaaagctgggaggaaaaatacataaccaccagaattatatccactccccaaaatatcttcagtgttttaaaactgggattgagtaaaagatagtgacgaaatatctctgctaggaagaatgaaggttgagaaacactttagggagagtatcttgattaacatggctggcagtaaatgatatatcaaggtggtccgatagccagtactgctgtttgcatttctattagttgagatcagtatgtcatccatacctttaataaagcctatcacacaccaatgccttggataagttacacatgcctccagaaatctgtagaaagtttggctggcaattatactttacacttgaagagtactggaggcttgtgcaactatttatttgtgcaaatatttattgtcaactgacgcctgaattgtacatgtacaaatcaaatgaactaattaattgcctattcaatggataatttattctatttcatacatatttttggcggagaagtcttccatgcataatggaaacaaagaaaaatcctttatacatatgaatgaaaccacacccacctacccctaatacgacaaaacaatgagaccaaatcttgatttctgacataagtgtcgagttactatttgcttaatagtcctcctattccctgcagagggtaattttttggaacagattcttgattagttttttgatgttaggaagatgagaattcacaaagtaactgatgacttcatacactgtatgctgtttctaggaatcctgaaagcatttacgagcaaatgctctcctcagttgtctggagggcatctggttgcctgtgttcaaatgtacaagcacctacaagtagattacttcttatctgagaatgaaattaaacaacagagggtcctgagtccaaagtagtgcatcagcccaggtagaaaagtgtccagttgataatggaatattggatatcctcctgatgaggaagtgcccttgctgcacattactcaactcagaggataaactctgtgcctctgctgccatttgtcgttttttaaaacactatctgggtgaagagaacttctcatccaactgaactataaccacaagagcaaagaagttcttgccatagtagagcccatcaggtctgtaggtggcttaattgaggtaggtcaggacctctttgtggtaatcagaaaatgaggctgatggtcagccatcctagggacatacactcttctaccaagttctcctttcgcctttcccctcttccctgagttcacacagaaattaattccataaaactctgagcaacatggatttgtatttttttcattctgcattagattctagttctcttaacccttctgttggtcttgcccatgaaacagagagagcaagaatttcatcctactataattattctgagtgtctcctccctctctcctcaccaacctacccagcactggccctggaggacgagaaacatacccatgacagggcaagacaaaagcattactttattattcacatattttttccacacaccttaaacctatgttcagtatttgattttcttgtgttgttagaggaaggcctaacgagcctaaaaaatagaagtacaaattttctttgattggggagagagccatgatggttaactagccacagccaggaggagcttctcccatgaagagaccagatcatcaagagaccaacacacactgaacagatcttcggaaagaaggcatccagagtggatacaggaggatgctgaaacaggcagaagctggaaagcctgtatggggtagtcgagcaccaggactcctttctggccctgagtgctggtagggacgggatgagaaacataggcatgtagtgacccactcttgccacagaccttcaggatcctacctgcaggagaacccacaatccccatgggcattttaattggcagggagaactgcccagagagttgacagagacagaactccagtctgtgcaaggcccaaggggtttggcatgggaaaggctgcagtggagtatggccatggatgcccattaccccaaagcttgccacactcctgtaggtgactttagccttagttagcagggagacctggagagagcagagctctcttgcccacgggacagggcaagtctgatctgaatgagccccagtctgccagcctctcccagggtctccacctggccttaccagcttgcagtgcagtctcagctgtcctgccaaaatgcttgccagtggctgctgccatagctcttttgctagcaacccccgccctcggaacacttttgcagatagatccttgcaggtgtgcacctgcctgcagccttccccgccggcgcgcctcgcctccaccccctggcctgcagcctctcaacatgaataggaagacccaccatcgcccgagcagtgcacatgagcactggggaccccagtcatcccattggcatgcactcaccagggccctcacttgccaccccatcagtgggtgatccgcttgtgcaccctcacacgcagccccccagctgcagccagcacacacgtgcccccatgccaccatgccgtagggcaatctccccctcaactactgcctggccacagctcttttgctggcagcccctgtcagagtgttgttgccagtgagctgggagcaccttggcccctccagtgcaacaggtgcttgacctcgaaaggccagaaaacaaagccagaggcttggtcccagacccccagggttacagcatgtaggccaagagtgctgagctgaaccttggccctttgaaagcatctaccaacaaaggcaatcaactaaaccaaacttatatcacatttaaatcatcaaaggcatcaaagaatatgaaagcaaaagccctgttgaaaggatagcaacttcaaagattaagggaacatcagccaacgcagagaaagaaccagggaaagaattctggtaactctaaaggccagagtgtcgtcttacctaccagtgactgaaccagctcccccagcaatggttcttaacctgattgaaatggctaaaatgacagataaagaattcagaatctgatggcaaggaagctcaatgagatactgaagaaggttgaaacacagttcaaggaaagcagtaaaatgactcgagttgaaagatgacacagccattttaagaacaaaccaaactgaacttctagaaataaaaaattcagtagaagaatttcttttttcaaaacttttacgttcaagggtacatgtgcaggtttgttatataggtaaacttgagtcatgggaatttattctacaaattattttgtcaccaaggtactatgcctagtacccaatagttaattctttttgatcctctccctcttcacatccttcaccctccagtaggccccagtatctgttgttcccttctctgtgtccatgtgttttcatcatttagctcccacttataggtgagaacatgtggttttctgtttctgcattagtttgctaagaataatggcctttagctccattcatgtttctgaaaaggacatgatctcatgatcttattttttatggctttattttttattgctgtgtagaattccatggtgtatatgtttgatattttcattatccagtataccattgatgggcatttgggttgattccatgtctttgctattgggaatagtgctgcagtgaacatacacatgtgtttttatggtagaacaatttatatacctttgggtatatacccagtagtaggattaatgggttgaatggttgtcctgtttttagctctttgaggaatcaccacactgctttccacaatggttgaactaatttacactcccaccaacagtgcataagcattcccttttctccacaacctcgccagcatctgttcttttttgactttttaatactagccatttagactgatgggagatggcatcccattgtggttttgacttgcatttccctaaagatcagtgatactgggcttttatttcacatgcttcttggccacctgtatatcttcttttgagaagtgtctgttcatgtcttttgcccactttttaatggtttttattttcttgtagatttgtttagcacagaagaaaatatctgcaaagcatacatctgacaaaagtcattctatgaggccagtgtcatcctgataacaaaacctggcagagatacaatatattcctgatgaaactagcaggccaatattcctgataaaaatagatgaaaaaaatcctcaacaaaatgctagcaaacttaatccagcagcacatcaaagagctaatcccctataagcaagttcgctttatgttcctgggatgcaaggctggttcaacctacacagatcaataaatgtgattcatctctttaacagaactaaaagcaaagaccatgtaaccatctcaatagagacagaaaaggcttttgacataattcagcatccttttatactaaaaacactcaataaactaggtattgaaggattatacctcaaaataataagaactgtctatgagaaactaacagccaacatcatactaaatgggcaaaagctagaagcattccttttgagaactgaaacaaagcaaggctgtccacttttaccactcttactctgcatagtattggaagtcctagccagagcgtcaagcaagagaaagaaataaaaggcatccaaatgggcagagaggaagttaaactatccctattttcaaatgacatgtttctatacctagaaaatcccatagtctttgcctataggctcctagatctgataaacaatttcagcgaaaatttaagacaaattgatatacaaaaatcagtagcatttctacatatcaataacatccaagttgagagccacatcaagaagtcagtcccaatcaaaatagttacaaaaagaataaaatacctaggattacagttaacggtgcaggtgaatgatctctacaatgagaattacaaagcactgttgaaagaaatcagagaggacacaaacaaatgggaaaacatttcatgcccgtggataggaagaatcaattttgttaaaataaccacactgcccaaagcaattcagagattcaacattattcctatcaaactaccaacatcttctcagaattagggaaactattctaaaattcatataaaacaaacaaaaaagaatgcaaagagccaaagcgttcctaaacaaaaataacaaaaccagaggcatcacatcacctgatttcaaactatactataaggctactgtaagcaaagcagcattttactggtacaaatagacaaatggaacaggttagagaaaccagaaacaaagccacacacctacaaccatctgatctttgacaaagtcaacaataacaaggagtgggcaaaagactccttattcaatacacagtgctgggctaactggctaaccatacccagtagattgaaactggacctcttcctttcatcatacacaaaaatcaattcaaaataaattaaaaacttaagcataatattataactaaaactataaaaatcctagaataaaacctaggaaataccattctggacaaaggccttgggaaatatttcatgatgaaatctccaaaagccgttgcaacaaaacaaaaatatacaagtaggaactcattaaactaaagacctttggcacagcaaaagaagctatcaatagactgaatagacaacatacagaatgggagtgaatacttccaaactatggacctgacaaatgtctaatatccagaatctataaacagtttaaatcaacatgtaaaacacataactccattaaaaatgggcaaaggacataaagatatccttctcaaaagaagacatatacgtggccaacaagcatataaaggaatgctcagcattattaatcattagagaaatgcaaatgaaaacctcaatgagatatcatctcataccagtgagaaatgactattactaaaaagtaaaaaaattacagatgctggtgaggttgcagagaaaatggaacacttatactctgttggtgggaatgtaaattagttcagccactgtggaaagaagtttggatatttctcacataacttagagctacccattgaccccaaaatcctattactatatacccaaaggagtataaatcattctaccaaaaagacacatacgcttgtatgttcattgcagcagtattcacaatagcaaagacatgaaatcaaggtgcccttcagcagtggactggttaaagaaaatgtggtacatatataccatggaatactatgtagccataaaaagaacaaaatcatgtcctttgcagctacatggatgcggcttgaggccattatcctaggtgaattaatgcatgaacagaaaaccaaaaccacctcttttcacatataagggggagtaaaactttgaatacacatggacacaaagataggaacagcagacactcaggcctacttgaaggggcattgtgggaagagtatggggttcaaaaaactacctttggggtactatgctgtattaattcattttcacattgctgtaaagaaataatggttctgcaggcttacgggaagcatgatgctggcataggctcggcttctgggaaggcctcaggaaacttaaaatcactgtggaaggtgaagatggagcaggcacatctgatgtccagaggaggactaatagagaagtaggcagtgccatacatttttaaacaaccagacttcatgagaactcactcactatcatgagaacaacatcaagaagatggttctaaactatgcatgagaaatctgtccccatgatccagtcacctcccaccaagccccaccttcagcaatggggattatatttcaacctgagatttgggcaggaaatgtcatatgctcactacctgggtgatgaaataatttgtccaccaaaccccggtgacatgcaatttactcatgtaacaaacctgcacatgtactgcctgaaattaaaagttgagcaaagaaaaagtaaccaaagaattcaaaaacaaagtttgatttttacctttattttagaccaaaattcaagtatttttgctgtttcaatagcggaaaatgttgagttcaaaaaagattatgttaaataaaaagaagttaaagagtttttaacccaaggtcaaaaaaacaaaaacagggcttagcttagacctttttaggattagagctgcaggagtggccctacatttttcttatggcatctgtctcatgagggagggaaaaatataaatgtgcattttccattagaacctgaaaatcagtagctcttttaattaatgctgaaaaaaggaaggtgaaattaaggtacaaaggagccagaggctttttgggaggctcatattttcttgttccttgccctttctatgttacaccattgggtttctaagtaaggcctatggtcaaaagaatgtatccctcgctgcttctgaggtaggaatcagtgagagtttactttcatttggcggcttccctaagccttgcctttgcatttatgtatttgttgtatatatttgaaactaaaatatcaaagcattaaaattattatttcatgttgaaataggagcttctaatatgaatcagaaaagttattatttaaattgactgaagaccatactttaaaccactaaatattctaataattttccattggaaatcatactaagttatgctatccaaacattcttctaaaagcaatctatttagtgggccaggacacatatattattggtgtcttattgtacctgtagacatttttgaaaaaaatctgaatcccaagtacttacattatctcatttttaaaatagctccctctttctgactctctctcttgttggtatttcctcaatacaaagagaaaaaacctctagataacaatatgctttgctactacgtggtttctggatgagtttccatggtgagttaagttagactacctagtgcatctctctctctctctttctctctttctctttctctttttctctttctctctttctctttctctctctctctccccccttctttctcccccaatccctcgctctcttttgatctacaagtagatctaaacttagtatgacagcaccaaaattagcaccaaggaatttcttactatatcctacctctggtatcaagggaagcgtatgagaaggtctgaaagaattattttctggtatctaaaccataagtgctctagtctgtctatcctaggctttttttttttgcaactggaaatcctagactgacttaatttctaacatctcttaacatgtcattttgtggaagacagttaaaatctcaagaaggaaagagaaatagaaattgtgcccctaccacaattccccctttcccccaaaattctatgagtcagatatttcagatattgaacattgttttctgttggtaaggattgagtggtgggcagataaaagaagtaaagaagaatctggagattttcctaaatggcaatatctatcagtttacctggatcacatttgttcatacattttatggtgagttctaatagttaagctgatttcactttgtgaagttaaagcaatgtatgagtgtttgagaatgacagtggtggggaaagcaaaggcagcaatggtaatgttaaatgatgccaatttgaccgtcaggccatatttataccggttgggtgctgcactgacactagagagagattagtgttgaatgtcaactggaccacatattatctgtgttaggctgaagaattaacttaattctctgtgtcttagaggatttgtatgaatattaagtgaattaatacacacaaataatttataatagtacttgatacattttaggactaagtttgttaattattatattagtaatattcattattatagaaaataattcctagcttaaattagtcttcctctgtaaaacttgtctaattactcaattgcccccaatatttatctttctaagaatactgttggtatttagtgaatgtactattcatttggaactccttgttttgtgttataagttttgcatcaccatctcctggcctacttttcccgcagcacacaatctatcttatactttgatgatgatgatgacgatgctactgatgagagcctatggccaaaataacagattctaaagccaagtgtgaaagtcatattttgatgtggtgaaacatgcggaaaatggctcggcggatttcctttgtcttggcgctataaatgagagggttgagcacaggaggcacaaataggtacacatttgacatgaggacatgtatgtagcatgggacatgcttcccaaagcggtgcactgtggagaccccaatcattggcacataaaatgcaagtacagccaggatatgtgacacacatgtgttgagagctttgaggcgttcctcacgggaagcagtggccatgacagaacgcagaatgagcacataggagaggaagataaaaaacaggtccatgccaaaggtggatacaagaacaaagagtccatagatgctgttgatactgatatcagcacaggcaagcctcatcatgtctgggtgcaggcagtaggagtgagaaagaacattggatctgcagataggcagcctcttaataagaaagggaagagggaaaagggtgatgaagcttcgagcagctgcacctaaacccattgcagcaatgacttcagtggtgagcacagttgcatagcgcaaggggtcacaaatggccacatagcggtcaaaactcatggccagcagaatacctgattccatcatggagaagaagtgaataagaaacatctgaattagacaggcatcaaaagtgatgttgcgggcattgaggcagaaggttcggagtacagtgggcagtgtggccatggatatggccacatcactgaaggacaacatggacaggaagtagtacatgggctcatggaggctgggctccactcgcacagcctgcaggatcactgtatttcccccaagggccacagcatacatcacgcagaggggccctgacagccaggagtgagagctctccagaccagggataccagtcaggaggaagaatgcagggtgagtgacattgaacaaccccatagcaaaacaaacttagggtacttttcagagtcagatcttctgacttggagaattctaacagttgcacttgctggaggacaagaaatcaggagataagagacaaagcgatgatgttgacataaatggaaactgacgcattcatgaaatcactgcttttgagatgatgcaggcaaactccttttcttcatattttatgatgatcagcctgcaggctgagctaatatttccctctattttatgaacaaggaagacattgacaaatacttcaataatagaaattagttaaaaggaaaatgtttaaactacatttctacaacttgcatatattttggaggcatgattcaatagaaatatgctaactacaattcatagccacaagagaagaaagtcaggagtttgtgttatcagtagcacttggaaatatttaaatattttcttgaaaatgttgcttaattcatatgtatcacaaattaatgagagactttcccagagcaagttttgtatcatgttgtgtgcttggatggagagggaaaaggacagtgggctgtggaggtaattgactgcctccagaggcagtcatgagcttttcattggcagaattactgcaaaaaagcaacaacagaaataacatatttttgtgcaaaggcacaaggctgtatctgtttctggaaaaattatgtatttgtccctaaatattctataggtacactagcattcggtgtgggagagcattgttccaaatacaaacttacataccatcacatggttagatgtactctcaaaatacccattagtcacaaggacacattaatgtaccttcacaacaggtagtaagaaagctcattcatagtctaagaagacgctcattcacatactctctccatatctccatatctcgtaaagtcgctcttgttgtgcaaatatattcaaacagtccctgttgattttttttttttttttttttttttttttttttttttttttgagacagagtctctctcttttgcccaggctggagtgcagtggtgcaatctcggctcactgcaactccacctcccgggttcacgccattcttctgcctcagcctcccgagtagttgggactacaggctcccgccaccatgcccggctaattttttttgtagttttagtagagacggggtttcaccgtgttagccaggatgatctcgatctcctgacctcgtgatccgcctgccttggcctcccaaagtgctgggattacaggcgtgagccaccgtgcccggcccctcttgatctttataccatttaacatgtagatcttgtcctcatactctcagtctgcactgacatatatgcaggatttatacatgtatacacactcatagacacatagatttgtatactcacacaacacttctatctacatgcttggggactgcccactgatattaatctactaacccacacaggcactttttaaacccttaatggcttgtatttatttaccatttttcttatgctggcattcacatattatttcttacagccatttctctgtcacagtgattgtattgtttattctgtttttgacacacttttgtgttcattgcctcatcgtggatgaggatacagaaggctagaaggcttttcactaagcagacatttcaagctaataggtcaccctcattttagagaaggaccccagaattacataccgctgtttttcctttctctttcctctccaacctctaacaaagcaagaccggaccatgctctcagagttctttctgatgggaatgaaggagaaaggggacccaggaacatatgaggtatctaaaagtaacagaggttgtggaatggggtgcaatgaagcattgtcaccccaggaagcatttttaaaatatccccagcaatacataactcacaggtactatggtttccagcaaggcagtggctgtccctccgtgttgtactgaatatgtcccttctggtcttagagctcagtctgcatatgcttgtgtctcttcaagaactctgattacttgggatccagaactgatgtttgtctcttatttctcccatttgactacactctcattcttcatataaagtcttgtagaaagtaatcacagtacatagaagagaaccaagccaatgtaaaagtaacagaaagagaagggagaagaaaacaggctgaaagcaggattttgttcagggcaaggccaaagccattctgggtctggggacttatgctttagtatttgtagaagaaagactgcctgactgttccagaattatatcccttcccttaccttggggattgctaattttgtgggttgtctggacagataggaataaagtaatactgagaaagaaaatgaatacttattgaacgcatgtgatatgtcagctgctctgcaaggaactttacatttattttctcgtttaatacttaacagatatggacactgagagccagtgagatgagctttcctcacagtttatggagaccaggtgataaaacattaatttaaagacttttaagactctcttctctctttttcttttttttttactttaagttctgggatacatgtgcagagcatgcaggtcatgtcctttgcagggacatggatgaggctggaagccatcatcctcagcaaattaacacaggaacagaaaaccaaacaccgcatgctctcactcataagcgggagttgaacagtgactctcttctctcttaccaaggtcttcgaagtatcattaaggcattggagagtaagtttaaaaggaaaatagaggaatgcatttctgaacaaagatttcacaggtacccctaaacaaagtgagtggttaaaggcagatacataagaaaaaattacacaaaagtacctgtctccaaggctgaacacaaattctcctattcctggaactagaaccttgagatttctgaaaccatataggaaccaggtggtttagaagaaaggaccccgagggtgtcaggagtcctgaccctggctctggaaggtactggctatataagcgtagaaatatctatttctttttttagacctatgtcttatttttattcattaattaattaattcatttatttatttgagactgagtcttgctccatcatccagggtggagtgcagtggtgcaatcttggctcactgcaacctctgtctcccaggttcaggtgattcttgtgccccagcctccccagtagctggaattacaggcgcctgccaccacgcctggctaatttttgtatttttaatagagacagggtttcaccatattggccaggctggtctcgaacacctgacctcaggtgatctgaccacctcagcctcccaaagtgctgggattacaggtatgagccaccacgcctggtgtatgtcttatttttaaggacattctctgagatcctttatggctttgatgttcttttacttaattttactttttaatcaagcaaagaatgcctgtgagagtttgctatggtgctgttatgggggcagaaagaaggtagaggctggaggaatgtacagaaaggctgtctaaagaccacagttttcaatctgtatcatggataataaagaatgaaaattatcagctattcattgttcatctacagtttagctgatttctccttttaatatcctggagatttttacgtattttgttatcactgaattcataagggaagagcaaaattaaaccacatgtgcttcagctgtttgtcatgggataggttgtgaccacttcccttctagattcccgaaccgttcctgtatcctgagtcctgcttccctctctgaatttgcagcaatgttaatgagccacagaaactttgacctttgaaacttggagtcacagagaaattgattatggcaagtaaggactcaatgaatcgcttggggttatacaatcagtacatggcagtgccagaacaagaaccccaagtccagagatctttcctgctcctttgctcattctactaagatgcttctatcagataccctccaccagtctcttccacttcccctcaccataccccttgcccagtctaatgctttcatggagcaggcttcaggagaatcagctggcttattcctatagagtttcagaactcaccagaagagagactgatgagacacccacagaacaagttcttccctgtctctgctgaagtgaattcatccttgccacttttatgtctcatgacaggccctgcggtagagggcagtgatgctgactttgtgtctgaaaattcttcagggaggttttagtctcctgaggtccataataactactgagaataaagcctgtgctcttttagctgaaaaagaacttagcaatctgtcagaccaattctctgctccactcaaaacatcttctagtgatagacaggcaatcgctgtaagagaggagctcattacctcctaagagattctggctttatgtgatgatgaccaagcccatcaattgaggtgcaatcagaaagtgactatttttactcttcttgtctctttaaatatattgagtggggctggttcttctttgttattcctggatgaaaactctgttctttaaattttctggtcacattcagataataaaatatcttctggtgaataactagaaggtttaatctagaataatagtcaaactttccagcattcagagctacatcctttcttcttctttcatccttcatgtgctaactctggtttttggcttctcctcccagaaacagacagatgggggaatggaaagttcacaattaattggtgctgcagttagttgttgtcatgttaactgggtctcttaaatgtataaagctgactctttcttacagttactttcataggttattcttagaagcttcttctcattttttacttgttctccacttggtttaagctaatatatcattattctgtgtggttgcttataactccttccacaacctagattgctcttgtggaatcttgcagtcttttggataggacataagacaacaccgtgccatctctctctagcttgtaccccattcaagaaatggtcaggcttttacaacaaatgccctacctcaatgcaacaatagtctctccttaaatgttgctatcagagcagaaaggtacgtttatcagtgttaatttattcatttagattaacatctactgggtgtggatcatattaagtgactctgttggcttcacatggatcagtcacaatctaacctaggaacaaaaattagggttcagttatggtctggtcagaatataagaaacacaccagctcttttaattgagaaaaattaatgaattgttaaccaaatattggcgaacacacaagacaaaaagggaatatgaaggtatcattgtaggcagcaacttgaggacatagcttctaagcctaggactagaggaacaaaggtaggaatttggcataattaaaccttacaaatttgaaacaggagtgctgcaaagctgaaactcagactttgaggagtggtcactgtttaggtgattctggggtctcaagaattcagaagagaggttccctatgactaggacttactcttctgagatgggggttgaggggagacttatctggctaattctgaggtctttaagagggcatggtaaggctggttctagaagtgttggaaagcttcaaaatataaccaaccaaggccactggaattgaaccactagtacttgggtgaagaagtgccactggggaaagagccacagaaaggaagtagggtacaagttccttcttcctgccccagcttcctaatgccccatatttgtagatcttgggagctggttggcaaaggaggaatgcagtttgcagaggctcaatcccaatatcacaaaaaatggtatagaagatatgggattgagactgagcggtgataacataataataagtacaaaaaaactgaatatatttaatcctggaaattatttatacagatttcaaaagaaatgaggaactgaccagcagatagtaacatagtccagagatttgtaacagcaggaagctactaccacctatagactggaaagccaaaggtggggttactagaactacagccaaagtgagcccaaccagtggaagctggaaccatagaagagatgcagctcacactagagactctgtctgaggcaggggagtggagtgagagataccttgcatctgtcaatgcttcccaaccagctgtatccatcatattcttcaagtaatgattggataggtgtgatataaagagtcacaaaagagtcaggagtggacttgagggtaaacaggcttagccttggtacagaacagaagcacattttgttagcctcattcttattgtattattatcattgtgagatacatgatctcctaggggctttcattttcatggtcagcaccatgcaaagcatcaacttgttgtagtccatgaaagatgaaagtaattgatgttttagagttctagggagtagagattctgttgtacaaaatgatcttctcccttaaagccagatgcccagatttctctgggaactacttctggcaggtacactatcaaacacgatttatatccccatatccctaaaaccttacgcactgaagtaggatcaatgcctcttttcttcacaacactgttcagttctgccatgaaggcagtgatcacactctattatagttggctctgcatgtttctgtggcatccactggacagagagtcctgtgggggaagaaatagatgtccctagaatgggatataggcatggcagggaatgtttatttgttgaacataagtagttaatctttggcaaaatagcttcaactgaaaaatttgattcttttctttagtcatataaaaatatcaattatgtcaaatacgtaaaatttatcccataacatgctaaatactgagttgatataaaagatgcttggggttagtttaaaggacattgatatcacttgtattagtttgaattttcactggtgttttgaacatggcataatagactatgtcttgcttcatccttttttcattaaaaatttcccaacattttattatgaaaaatttcaaacacagaaaacttgaaagaatttcacagtgaataccagtatacttatgacctaaattctaccatgaatattttattatccttgatttcttttttttttgggttacctcatgagagttattctactttctttttttatgtatgtatttttattatactttaagttctagggtacatgtgcacaaagtgcaggtttgttacatatgtatacatgtgccatgttggtgtgctgcacccattaactcatcatttacattaggtgtatctcctaatgctatccctccactctcccccaccccacaacaagccccagtggctgatgttccccttcttgtgtccaaatgttctcattgttcaattcccacctatgagtgagaacatgcggtgtttggttttttgtccttgggatagtttgctgagaatgatggtttccagcttcatccatgtccctacaaaggacatgaactcagcattttttatggctgcatttgatttcttatttatcttctgatgtatccatctttctactagtttatcaatacagctcaccttttggatgcatttcaaagtaagttgtaacaacaacacacttctccataaatagttcagcagttatattattatttgtagttcaatacattgtatagttctttgatttctttcagacatatactgcacaagtcttacatgcacactagataagttttgataaatgcattggctttgttgtgaaatatgtttataacatatttctagatagggcttggaggtacatttagcctgttaggtggattagtttttaaatatttatgttctttgcaagggtaggtgctgcgtctttattggtctgtatactataagtgctgataataatatctagactaaaatgttgctcaaaaatctgtttttatctgtttggttggtggaataaactgattataatttttaggttccatatagtaatggagtaaaaggagtgcttgcataaggaatttgttacatggatgctagcatgcatttgtacaaaaaatacataacacacttaaattccacatatgaatctgaataaatatggagatctgaatttgttggatattttattgacttgttaatgagaatgtgaatatgtatctgcaatatatatttttagctatttaagcagggaaatgtatttaaaacatatttgatcatttctttaagtctctatttcatagtctttttctaagttttgtctataatttaaattggtctatataatcaatgtacgaatacatagattatagtgtgtgtttgatgtgacaatacatacaattagtgactagagcactgggcaattgcctgagtatatttgtatttatctgtttgtatgtatgtaaatttgaatgaggcaatgtgaatgttagtaaataaatagttaaataggtctaagggggtatctgtgaaggtctcaggagagctatggctatttatgtttctgtgcatacatgtatgcagtgtgtttacattccctgatcaaagaaggattaacacactaatagatatggatgattacatcagggataattgtgccaagaaagatattctcctgggagcaattctcttatggcccaactcactcttcactgataccaccttcccagttatttccatggtccctcctcccaccacacacaagcaagacttggtgttctggagggctcataaatttataagtcttaggagaatgagctgatgccactgccagctgtacccacagcatagtatatccagctacaaggaaagcatcttccatccagtgagtgctccctgcttcacactgcccacctgacctctttatctagattttattctaaattttaacacttttgccaaaattccaggcagcctttaacccttatatctccccttctaaatgtgagccaaatctgaccccttccaaactccaggatcacagacacctgatgccaggtttccatctaaatcaaaaccataataccaaaccacatatcactgagttaaggtactgctgcatcatttatagatttttgtctcaaggatattttatacttcttatttaaaagcctacgatttgaatgtttgcctttgatacctgacttttgtgtgtacagctggagaaaagttacagaaccaaatgactgaagtcatttaacaatgtagttgtcaatcttagctggattttcagtattgtgtatgtcagcatatatgtatgtatatgggaaaataattggtggagatattattgtggttttgttaatgctgatgcatttgtgacactgtgtgtgtataaacatttattcaggagagcttaaaaataagagaatatttgaaatatattgcataataccaatgagtcttcctaagttgttgcatgatagtattttgtgtgagtaggggagtgtttgatagtttgtgtgtatgtgtgggtatgagatagtgcctataaataccgggtgtgtaagtataagagtgtaaaaatgtatatttttctggtacctttgagtgactgtgtgtgtgtgtgtgctcatgatattctgtgcattgcttgtgtctctccaccttcttgaccttccttccaagataggtcacatttaggaagttttcatggacactcctgtggacaaagcaaagaaaaaatgttttgggggtggtggtggggaattttctccatggaggaaaagttttcaaagttgctttgtagactgatgaaaatctggaaaatagataaaatattactttctagactacctcaatttgcatgccagtggttacagacgggggtaaacctatcttgtggatgaattcttagaagagtctttttatttcttcatgactcagagaaaatcttgcagcaaaggtaaagaaaaaaaaaaaacagatctgaacaggctagatctaaaaagacctcttagagacatggactttaaatgtgggtttaggggaagagaggtttagcaaggagagtagcccataaggagaaaacactactcattaaatggatgctttgccttttcattgggaggagagagaaaccaaaggaatagatgaatctcttctcactacctatatatatttgggattatgactgatatctcgatatgatccagcaccttgtcaccatctaatttcactctgtttatgaggagtggtaggaataaaatgggaactctaaaatgagaaaaataataaaagagacattatgctgaaattccagaatggaggtttaattttgagatatcaaataccatgaaaatatagtagaagagctattttaaataaaggttgagatgaagtctcttatggtgtgacttctcagtttgcatcattctgactattgtttattttgcctgaagttaggctgaggctgcttaaaaaaaagacagaaaagataattcagtaaagaaggcagagaaggagaagccaaggaagaaatacaattgtggacaaatagtacccttgaatggagaaggtggttctaaacaggtgagttaaagacagtgttaactgtagcaagaagatcaagtgaattaggagagagaatgttttcattagattcagagacaaagaggtcactaggtgaccatagagaaatttgtttcaactcagaggaggggagtgtggaagccacgatataatgaattgagcagtgatagaaggtaatgtaagtaagattgaatcccgacatcgaagatctcagaaacaagctggagaagcaggcaaataactaaaaaataataatgataaaatacaagcttctattttcaggtacctggagagacaatttttcaagaaatttggttaagaattgggaaagggtcatagagtggtgggtagagaagaatgttatcgcatctttatgatggaatagtcttgcacatacttattgtctgaaggaaaagaggcagaaagggagagaatgaatatccactggattagtgaaaaaggctctgaaggagtgacaagaaatgaaatcctgaaggtggagagcctgtccttggagaaggagagaaatctctttctcagaaaatagaggttaagaatgaataaaggtgtgtataagtttaaaattttggtaatggttaagtaataattttctctttttttattcccataaaatactttcttctttggttttatccagctgcatacctggtttgattgtagaatttattaaaggttgcagtttactatatgaaggtgaaagagagataaagaggagatgaaaataccagttttagtgtgggtgagtagttcaggagaaaagtgaggaagaagagttcatagaccagaggaaaatgggggaatcatggagactcaagagcaagtgcacgggcatgagaaggttggaaggtagaagcctagagtaaggatatgaaaacagtaaatttaggatttcagggatagaaaagtttttggctatgacaagttcaggggcagccattgggattgggaggctggggtgaagtctgagctacaggttattgaatctgtaaatttatagtagtagatgttccatctatgctatctaccaaagactttccaaagcctaggatgcatttcctctttctggtctaccagaagcaattgttaatgttgtctcctattatgccttgctatgttatgggcactcatttgatcatcaaaccacagagtttctactatggcctagatagtgagcagggccctggtggtacacaaacgattagaacccggttgcttccttaaagagatgagtgtcttactgggaaggcaggaatacaggcaatcattttcaatctatgaccttttgttggagacaggatatctgaaagaaagtgaagaagtttcccaacacaccctcttgggtccattccctatctatattctcccaccatgctgggtctcaatggcacccccttccagccagcaacactccagctgacaggcattcctgggatacaaacaggcctcacctgggttgccctgattttctgcatcctctacatgatctccattgtaggtaacctcagcattctcactctggtgttttgggagcctgctctgcatcagcccatgtactacttcctctctatgctcgctctcaatgatctgggagtgtccttttctacacttcccactgtgatttctactttctgcttcaactacaaccatgttgcgtttaatgcttgcctggtccagatgttcttcatccacactttctccttcatggagtcaggcatactgctggccatgagcttggatcgctttgtggctatttgttatccattacgctatgtcactgtgctcactcacaaccgtatattggctatgggtctgggcatccttaccaagagtttcaccactctcttccctttcccttttgtggtgaaacgactgcccttctgcaaaggcaatgttttgcatcactcctactgtctccatccagatctcatgaaagtagcatgtggagacatccatgttaacaacatttatgggctcttggtgatcatttttacctatggtatggactcaactttcatcctgctttcctacgcattgatcctgagagccatgctggtcatcatatcccaggaacagcggctcaaggcactcaacacctgcatgtcacacatctgtgcagtgctggccttttatgtgcccataattgctgtctccatgattcaccgcttctggaaaagtgctccacctgttgttcatgtcatgatgtccaatgtctacctgtttgtaccacccatgctcaaccctatcatctacagtgtgaaaaccaaggagatccgcaaagggattctcaagttcttccataaatcccaggcctgaggaaggctgaaggccccaaaagctcctttggaggaaggattgggacatgttaacaacttaaggaatgctaaagtaaggatgaagaggacccaggatcttgatagtagtgaatgtatcactaataaaataatatttgactataaaatggcatacatatttattcaatacttatgtgaaaattattgtgctagttgctactaggcatgttataatggtgagtatgaaatattgtcaagtaaccagatagacatgtgaagagaaaatataaaaaagagccatcggtatcctgaaaaattcttgtttgacatatacgggaataatgaagttcagcagggcaaacagaatttatcaaaaataattctgctcctgcccagagtgaaggagataataaatattaaagagagacaaaatatatggaggctttgtatttaatgcaagagagaagatctactttgtttgtggtaataaaaacaggctatgttgagtggttatgaagtagcttgtgaaggatgagagaagttagaattcttgattcaggatggcaggaagaaagaagggtactgattttggcagagataattgcctgagaagaaacacttaggcagaaacgtttagaacagtactattccaagtatggtctactaaacaatatcattgacatttctggtagctttatagagaaacagattcttaggccccacataagtcctactgaatgagaactgcttttgataagaaccttgggtgattataccttgagaaggacaatgtttctcttttctgacagcactcaggtattagattgatgcccatctgctgtgcaacaagagtaacaaaactcatgattaacaagagtttggaaaagtggttctcgatatatgatttccagatcaatatcatcagctttgcatcgaaacttgttagagatgcaaattctgaggactttctttagacatctgaacaaaaaactatcaggagtgagaccaagaagtttgtgttttaatacattctgcaagttatttccatatctattaaaggttgagaacttttaacctagaatattggttacagataactgtttagacaaacggggagtttccaactgggacactggggcacaaggtcttgagagattgctgaagtaaacttgtgaatgacttttaaagtgggaaactcagtgtatcacaattaagcatatggtattgttggtgaagggaagtagagtagatttataaccttaatatctccatgagacagtgcaggtggaagacagaaatagcttcagaggagaatttgatacacaatttccagccaccccacagtcataatcccatattgtgctttccttcttttccctcaattcctacctcctgtcatgccaaactacttgacattgaaaattcaggcaaactccaactttagggctcccattcaggcaaatagaactggaagagagagagagagagagaggacgagagagagagaaagaacagttgattgtcatactgagatggttaggcaagagaaatttgtcaatggaacttcactgtacacaagtctcctgatcaggaagtcttcggagacttttctgcaaatctattaactctttttcttttctgcagtctattaacttcttccctctttagatgggatatgtttaatctggttgtatttttgtttaccaagcgtttacctgcagattgcgtctatctctgctttgctccattgttaaaagtttaacttccactccacaggatatatttatttctctatttaagctttgttgtggggaggaaagcttcaaaatttccccacaaatgacgtttaatacaataagccctcgtcttgagatttgcatggatgttttgtttagtattaccattatcagagtgaacaaatatttagagtttttcttgacttatgccctcatttaatggaggcagaaactgagtttggaaaaagacattttaaatatctaaaaaagagcaatagataatggcagtccaagctaaaactctgcactcagcacagagttggtcacaccagtacatgtgaattaagggaataaccaaacaactatttaaatgaatgaaaaaactggatccagtctgatgtttagatccagatctgagttttaagctcggaattcagagatctagactctgggttctgagcacagagttgcacttttgagactggataactgggggggggtgttgctatgaagtttggagaatttgtctccaacttcttcattataaggaaggagttgaaatttcattttctcagtggagagagagggcagtatctccaggtttgttccccttcatgctgcctctaataacatagctagagtcattttacatcatgacttctcaaagccctgcctctccttgccagagatttatgcccaatatgaggcatcatttgtttccttctttgtccatgattctgtgacctaacttacaaggtcatgattcatgattactcctgaatttcatctcctggttcccaacgcataatttttgatccaaccaatcctataacaataatgaaaagtagaaggtgttcttctgccactgttcctctgttcctttgatatttcagtgctccacatggggaagagaacattacatcttctatttccctccctgaaccatcgcaccacttgatagaaaagggagagagccttcctgctgttccttctctcaatacaccctcactctaaaactgagatgaacaagaagtaaaatggattatttaatgggaagttcaggtgttgggaaaaagaatctgtttgggagacctgaaatcaaaacccgcaagagaacttaacgataactagcatgtgtgataaattcaataaaaagaaacaaacctatgacttccttcttctcatttgaatctcaatcccttgtagttaggtgctatccttttttataaatcaggttcaaaactaaaggaatgttaatcttctaaaatcaggtggcaaggccaggacttaaaattaggtctgtatgattttgaacccatggtccttcagtatcctggaatgtttcttttggaggagacccttaacttgtagtaacttggcagaccatgggagtgggagttcaggagggaagtgtaggactaagtggattgaggcagtcaggtcatatcctctctggcttaaatcctggggttgtctctggccttcaagctccagtctctgagatgtgagctctggaattttcccgttggaatctaagctttaggttttgcctgagatctgagttttaagctcagaattcagggatctagactgtgggttctgagcacagagttgcacttttgagactggataactgtggggggtgttgctatgaagtttggagaatttgtctccaacttcatcattataaggaaggagttgaaatttcattttatcagtggagagagggcagtatctccaggtgaagtagtttcttgtttgctttttcttatctttttattcccaaggtaagatctaaccctcctcctttccccaataccagcacagcatcacactcaggcaaagcaggaccccaggggctctggcatctgggaacaattccgcagaggcataaaggcagcctcctctcttggctggtgcccacctgaggtccattctagagccattgtgagttctggtcctctgcctctcagtccaactcacacttcacaaagctccctcaaggtgatcaagacactttgatcagtctgtgtctttgaggtatgtatacaataagtgtgtttctagctacaattctgcttgtgcttctgtatgtttctctcagattctctcatcatgcctctgtatctttgagtgaatctctatcaatgcctgtgtatgtttgcatagttgtgcacaatttaaaaatcctcaaacctcacttttacataggttttctatagaaagaacaatattcattcaaataccctcatggtctgccagccactttcagataaagctgccagagactgctttagcagtgaaagacacatgggtgatcacacagcaggggttgagaacttgcctctgttctgtcccacacagatccacagacatgagattctgtcactgaataggagacaccttgcgagtctggaatctcaggcctgtgagcagaaagagagctgaaagaccattaacctcgattcagcagatgctgacattctccttccagaactttcatgaagagttatccagtctttgcttgaacaccttcactgcccagaagcttattatttcattgtgattttagaaaagtgtttcttacatgaaccccagactgtcaccctgtgatctccacctatggctcagcacctgtcatactgatcccaacccgtctctactgcagtctcctctggtcaaaatgaagcatcactcattccttcagtgtccttaatgtgacttaattccctttactttttgcgtgtgatgcagtcagtttaactcctatttagaatagagaaccaaaaactgaaggtacttcagttacagcctaagtagtatattcatcttttattcattaatgatttttttagcatatctttgtgtcagaatcatgtcgtgtgttgagaaggacaggatgaaccaggcacaagtctgatcctaaaagagctcaaaatctgacaggaaggaggtataaatgtaattttaataaaatagaaaaagtctgtacaaagtattacaaagttacagataagaaagttattgtttctgctaaatagtgttagaaaaaactacagatttgttttaagctatatatcacactgctgattcatattacactggactattgattggtcactctgacaggaggacttttgtggtgcagaaattaaaagtcagacacttggagaaatagctaaagggatttaggacaggttaagagaagaaggaaagattacaggatatcaccatggaaacctcagatactatttattcagttatttattcatccagttaaaatatttattaagcatctgttaggtatttgaccctgtgctagtatgggttatctagtgataacagacaaacaaaaacagtcaatatcatccattcttcttagaatttatggtctggtagggatacagacattagataattacacaagtacatacatgtttacaaattaacataagtgttctgcaagaaaataacatattccatgagcaatattcagttaatacttgatgaagattattatgtctctgagtctgcaacattatctataatgtagagaaagcacgtttaagaccaatgtgagaaagcacttcatatccatgagatctgtccaggatagtggtttagggatgcgataaactccccatcactgggaatgctgatgctgagcatgggtgacaattgtataaagatggacattctctcagtgggtacaagattggactcttgattcagattctagagagcctattaagtttatcactgaatatatagccttttgagatggggctatttttcaaaggtgacttaacccctgttccccaccacctgacctccagtttgcgtaggaggctagaaaaaaaatctatctgccattcagtctttttctctgcctggaaaaataaagataaccgacttctccagcatcttcccatttttctcatttagatgtcttttgcttcagaaggttggctgctggcctttatagggaagaccatgggacttataattggaagaactagattctagtcccagatcagccacttacgggtttcaggcaagtcacttgatatggctgttatgagattgaaataaggcatcttaggagtgaagaaattgcccctctggttgtcattttccatccacagattgagttaatcttttgagctatggtctccttgacgttgccaatcttttcactgtcctgcatgttcctcttttcatggtccttcgaagtcttgattcttacttcctgctgaagatgatgctttaccagggaccagcatcttcaggtgaggcaggtcaggatcttcaggagagataattagacagattcaaaagagtcctgccaagcccttctgtcccttaagtgaccctctagagaggtgcactagccccaaaacctaggctacatctgtgggcaccaccctggagtgttataagcaaatccaagtcaattcagaggagcttcaggatgctgagtggtctagtggatgatgaaacacaaataaatgtttaacttgtaggtccagagtggagtaggaaagttatctgaaagtcatggagggagacagggagagcttgcaaatttcattttagtctaaaatgctgtcactgtaaaggggctggaatgttacaaaatgaatctggagtggttctcaacattgggttcatctgaggagctttaaaacattgataattaggtactacaccctgagattctactttaatcggtatggggtgttacctgagcactgggatttttaagttcttcaggtgattctgatgcatagcaaaggttgagaaccgctgatcaataaggtagactcaagataaataaattggtaagaggcacaaggaaacacatttcacatgtcaggaaagtcattaattttgagagaggacagagttcagcagagctggtgcatgaagagtgtagagagtaagagaatgcaggacctaggatcattctcataattacattgctcttgtctccatagtcatagttcttttttttttcatttttagatgtaagatctcattctgttgcctaggctgaagtacagtggtgcaatcatagctcattgcagcctggaactcctggactcaagtgattcttctgcttcagcttcccaagtaactggactacaggcatgtgccaccatgcccagctaattttttaatttttaatttttagtacagatggggccttgctatgttgcccaggctggtatgactcctggaggtcatagctctttgtattcccttgacagtacattctcctgaccatacatttattccagcagggcatttttattaaacttttcagatgtatgaacaatttcacatcaacactgggtaaccagaggataaagaattggtgcaggatcactgactcatacatcaaatctgttgagtgaatgtgtgaactggtgattggaagtaattcagtttttataccagtcatgagcaccccttcctacttcactgttattgtctttaaaaattgattttataaatttaatttgttatattacattaactatgttacattgtattatattacattatatattatttcaaccttctgactgggattagctatttctctctgatctcatggccactgaaggagtcttgtatctctgtgtctttgttttcatctttgcatatattcttggttaaatatggtcttttagaagccactacatctttgatagttttcctaaactctgtttgtttctaactcagaggtaacttgtgtattagcataattttcacctgaaatgtttatatccttcattgtccatattcctatttctccctttttcagctttttaaaaccatagtctcactttcattcaaaacatttttccctctctgaggtggaatggggatacatggagatgatctttactaggggttcttcccttctaaggttcacgttgtcaaagctaaaactcagttctttctgatgactccaacctagatcagaccacagtttactctcatctccatagtgaaattggtaaccttactacaagagaagatcatgaatctaaactgtaatctaggctctgcagaaactgacttttaagctgtggcctgttattcaatttttctctctgggtcctagtgtctctctaagaataaaatatcttactcaatatcccatgtaatatcttgcttatcctacaaaaaatctaaaaagcaagtgtattttaatccccagtttacaggtagagatactgagaaaattaatgtcacatgttcagtaatttgaagctctgcaaatggattctgaaagactttagttcaaaatactgaatatgtgacattaattttctcattttttcttacaaccagaaagaatagtattattacattcatgtcacaagttaaaactcaaaccaagccaaacaaaaacaaaataaaattttggatcagagtataaataagttgaacacatcacacatctagtaactggctgagtatggattttggctcaggtctgatttatttattccaaagtttctgctcttaatttttaagctatgctgtctttcacaagattgagcagtctgaaatattgcatgttcctgctcaaatgtgggagctaaaaaagttgatatcatgtaggtagagtgtagaatgataatcaccagagggtggaaaggcatgtgtgttaaggataggagaggctggttaatagctataaacacatagttagatagaaggaattagttctaatgtttgatagcagagtagggtaactagagttaacaacaatgcatatttttcaaagtagctaaaagagaggaatttgacatgttcccaacacatagaagtaataagcactcaaggtgatgaatatcctaagtacttcgacttgacgattatacattttatgcatgtgacacaatgtcacttgtatcccataaatatgtacaaatattatgcatccataaaaagtatttaaaacttttttaaaaacttaaaaagatggagcagtctgaaatatctcttttccaagtaacatttaggattctggaactcaggagaacaggaggagagaagaggatgtctgttatacttttattcagaatgacgtagatgactccaactttcttgcttcctgccccatctcctttcttcaacttttcaggttggccgctaaggcagaagatccaacggttggggactaacttcagtttttttcaaatggcaggcgaagactgatctctgctgttggtggcatgggagctgaaagcaatgaaagtcttgacctcctatctgtcttcctgactggcatcccaggactggaggcccaacatggttggctctccatccctttcttcaccatgtacattgtggccattgtgggaaacatcctaattatggcagcagtgcaggaagactctgccctacatgagcccatgtacttatttctctccatgttggctgtcactgaggtgggcgtctctgtgtctacactgctactgttacaggcattctttggtttgatgcccacagagttgactttgatggctgcctggcccagatgttcttcattcacaccttctcctgcatggagtcaggggtcctactagccatgagctatgaccgctttgtagccatctacaacctcctgcgctatacagccatcctgaccctgccccgtattatctgcatgggtctgggcattacactgaagagtgtggcactcatggccccacttccaatccttttgaggcaactgccctattgccacactaatgtcctctcacactcctactgcctccactcagatctgatccagctgccttgtgcagatactaaactcaacagcatcctgggcttagccattgttctcgcaaatttcgggctggactcattgcttatcgtggtctcttatgtcttgattctttatacagtgatgggcattgcttctggagagggacggtggaaggctctcaacacatgtgtgtcacatatttgtgcagtgcttatatattatgtgcccatgattggggtgtctgtgatgcatcgtgctgccaaacatgcttctcccattgtccacacacttatgtctagcatctgccttttggtgccacctgtacttaatcccatcatctatagtgttaagacccagacaataagacagggaattctcaccttgttttcctgcaagagggaattgctctgaatcactgcaaggagtcaggaactgtcattaaattcataaattccgataatgtttctgctatgggcaaagctctacattaggcattttgaggaggaataggaacaaggaattcaaagtattgcaacaggcttgaatctgaaatgcaagagttattcctaaccctttccatctcacattttatttgtgtatgtgtgtctctgtgtgtgcacatgtacatgactttctcttctaaccagatatggtgactttggggcagaagtaatggattttccttttcctcattttctcaaaactcctagcaaaaaagcctgacaaatagtaagttaacagtaaaaacttgagacttaatgaaatttaaatttaaataaagcaaaattctatttttatgggttaggtagggattacctaaccatatcttccaattaaaaaaatattatcctaggaacatgtctttgagtaaggtgagcatgctctctggttttctccagatattcatggtttacatctgttttccttagcattattattaatgttaccttcttttactctcaaaaatgttcttgatcaaacaataaattgtttatttttgtttacatttacctatgaagcaacttcttgttatgtaagaaaagagactcttcctaaaacttgctgtccagtggtctcacacccagaatttatgtaccgacactctgagaatgaacagctgaccaaaagacctcaactgaagcatgaaataaaatatgaacaatgtcacaatgcccaggctacagattctaagaatctcagcaaaagcagcaaattcttctttagtagaatcccaggctcaattttagataaacacttattggcaaataagtctgatatcactgttcctggctataccctttttctatttcctcccttcctttcatgcttctgtggctttaccgtgcatgtggtgcttttattcttatctgttccccatcctgccccttcctcagccccataatcatgggtctagtgggtcccctcccctctgcatctgcccatgtttgcctaggcttcctgcaaaccttggtcaagtgggaacgaccatcttctcatctcctaaacacacaggcctttgtataaagtgaatttatggaactgtgctgattgatcagtgattagtgtcactgatcattcgcactcactttggggcctccaattacaatgaaaatattgtcctcaccacatattattctccttgactcatccagcttacaagggttgtctttgtaaggttgtctgtgacttttttgaaatacttagtgtgtttgtagtcactgattggttcttccagcccactgcacagactgagaccctggtattgcggtgaagaatttattgacactagccacacaggagatggagttattactcaaaccagtctccccaaactctcaaaggctggggtttttcaagggtagtttggtgggcaggggactagggaataggtgctgctattgattggctggggatacaataataagaatgtggaaaatggtagtcatgtgctgagtctggctctgtgtgtggtgggtgcagaggaccagctgagtcatgagttacaagtctggatggggtcagtctgaaaaacatctcaaaacaccaatcttaagttctacagtagcaatgttaactataggaccaattggagcagtcacaaatcttgtgacctctggccacatcactttgaagcagtaagggacagtaaaaactatacctacattttagcagaattcaggcccctctcttatttctaatcctgtagtctttcattagccttacaaaggtagtttcagcctctgaacaaggaggtgattagtttgggggagggactatgatggtccttgtttctaagttaaactataaactaaattctcttatggttagcttggcctatgcccagaaatgagtgaagacagccaggctgtgaggctagaagcaagatggtgtcaatcatgttagatttctctcactgtcataatctttgcaaaggtggtttcatatttacaacagtagtcatccaatttttgtttatgtactttctaatataaaaagctaaaacatatctatatataagcatggatcattttacatgcttcactttattgtgcctcatagatgtcgcattttttacaaattgaaggtttgtaataaccctatgttgagcaagtctatctgcgccatcttttcagcagcatatgctcattttgttagcatttttaaacaataaagtatttttaatgtatgtacatttttagatatcatgctactgaacatttaacagactatattatagtgtaaacataacttttatgtgcactgggaaattttaagtatgactcttttttttgcaatattcactttattgtggcagtctggaactgtacccatattatctccaaggtacgcctatatcttctcaagaatattcagattgatatttaatttttttatgataaatttacttgttgagcatgtcttttgggatatatatagagtattataaatatacttagtttaaagtaaattgttgtatcacatctttaaatatccaagaaaatctaaacacataatgttttgatacctgacatcatgaatttaagaatacatgaacatgttctttaacagtcagatattttacatcagtacctttttcctctaactgaaaattttattttacctccatcaaaaagttttgaccatgcactgtatatttatatttaaaactattttaatattcaccatatcataattctttgcaataaaaatgtacataatttaaatttgatgtttaaaaatagttgaagttgtttttattttctaatatcattcccgtatgaaatataatggtagaaaaacattttaattaccagaagttttaggtttatttttctcatcaaaaatctaaattttgagcttcagtattttctatgctggttttatttgtcagataagttaaaattatttccaaagatattcagttttatgttaattcatgtgtttgttcctactggattgtcgtcacttctaggtgctcctagcttacagagcaaaaaaaatatgtcagcatactaaactgtgcatatacaaaatctataaatatttctgtgtttatctgcatctatattaggctaaactgacatcacactgatgtcttcaactctaattcatggttcattcaaggcttttccccttgtgtctgtaaccttctactctaactctgaaaaacctggctcacgccatctgtcattcacttcacttacctaactgttcaatttcagcacacatgtgtaggggcagggagaacgcctcactttcattctctgtgaagattcactggaatgactgacaacagacagattaataggataaaaggcatatgaatttattaatgtgcatatgcgtgggagccacataaaatatgaaactcaaaagaaaggttggacggtcggtatataccatcttcataggggagaaggagaaggggaaatgtaagcaattgtgaggggtagtaaataatttccaggggaaatgaataactcaaaagaacaatggactaggacaaagttcctctgtgctttgggggaggtgatgggaaggtgagtagtggaacttcactgtgaacaaatgttgtctcatcgtgcagataatgtctcccaggtaatctctcaaagctgtcttcagaagaatagatggaaagtttatctggatgtgatgacaactgactttagtctcttttctcctgtggttaatctttcctggttatttggtaagagtcctagaaaaggagttttaagataattgcatttttttctggaggtactttctgtaatcagatgagggaacttcagataagaaaggggatgagaaaaacagggagacagagagagaccttggttttgaggcttatttataaggactttcagttttgtttaatttaaagcactcaacatgccaaaaaactatactgtaggggcttttttgtgccctaacacatgtattagggcggtgttaatccacaccgccatgagaaactgattcattaagtagggtagagtacatactatacttctttttgcctttagtctaacagatttcacctatttccaaagttacttaggtcagcaactccccccttccccggaattatttcagtgtggttgtttcatatatttaataactataagagagttagatttttctggtcacattgtgcatttcatcctgtaatcctataatgtcttaaataatttttaaattttgtttccattaaacttcatcctgtaatgctgtaaattccatagattttggtaagtgcatagtgttatgtgtgcaccataacaatatgatagaatgattccaccaccctaaaaaataaaatcctcgagcttcacctattcaacacttcactttccccaaaaccttgactaccattgattgacatactcactatagttttgccttttccaggattctatttaaatacaatcatgtattttgttagccttttaagacaggcttctttcacttagcaatatgcattttggattcattcgcatcttcgtgcagcttgatagttcattcctctttaattgccaaataatattgcattgtgtggatgtattgcaatttgatcatccatttgtttactgaaggacaccttggcaacttcaaattttctgtctcttttctttttacgctaattattgcaaaatgattcttaggtgtttggttgaaaatttgtcccttcttctatagtagcaggctaggctagcttctatttgaactaatggatccatttaacatctcaaaaaattaatatccaatcttatgtcctcttaaatagctaacttaaaataatttacagagggtcaataagatacaaagaatattacattcttagaatcatactctatattttataataaacacatttctataacaaaatatgaccagtatagttatttgcgttttaggtacccaataattttgcagacacatttcccaattaaaaaaatttacaaaaatgaaatctatttcaaaatctaaacatatcatgatgttttaaagtcataaagccctcctcccctcgccacacacacatgcaaaggaagaagacaataaacagtttatctcaagaaaggaaacagaaaagggagaacaacaaataatgaagcagactacttgatttaatcttcatctgatttctagttaagttttgacttgttagttcatctctgaccacaaaattgcatcgatagatatcgctcatcaagacattatttatggtagcctgtgctcctcttttgaaaaaccaacataatcccaaaatttatttgctccacatgctgttctggagcattaacaagcctgtacattgacaaaaattttcttttgacccatatttctatccatgttcttgacttttttcagcatttggattttctggacttaaattctattgtgagaatgcacatcttccattttgcaatttacgccagcagacccatgtttctattaaaaaatgctaacttttaggctctagcagagaaaaaataaaacatgaggaaaggatgtaggaagagaaagagattcctttggtatttgctttctgcctttcacttcttttttttttttttttgaggcggagtctcactctgtcgcccaggctggagtgcagtggcgggatctcggctcactgcaagctccgcctcccgggttcccgccattctcctgcctcagcctcctgagtagctgggactataggcgcccgccaccacgcccggctaattttttctattttttagtagagatggggtttcaccgtgttagccaggatggtctccatctgctgacgtcgtgatccacccgtctcggcctcccaaagtgctgggattacaggcgtgagccaccccgccaggccctgcctttcacttctaatgctacttacagagacaggaggcagccaggggtccccagtgaaaccctgccttcaaccctaaataacagcctgaaggctgaaaaaccagactgttggtcctggatgaagcctgccttttcctgactgattctttctgaataatgcctacctgtgtactgggaggatggagggcggcctcaggaacttcatgccatttgcagaggggaagatcctggcctctcctcttcctgtgtggtgacctgggattcaatctgtgagtcgggaagcctggtagcaggactctttcatcttgctgaaaggtgtttttttgtttgtttgtttgttttttgtttgtttgttttgttttcccttttctcttttccccgaataactttcattttcctcacccttctatgtgtctacgagcctaatccttcctggttgtgtgacaagagctcagttttagcggaactaaggagaaagttctgtaacactaccttccactgtgctcccactgcctatgttgattcaaatctaagtggatcccaatattgaccacctgcaccatgaatccagcaatcagaagctgtgatcaaatttatagttgtcccttcaaaccgatattgctgggaaagtttatcttgtttccacaaaatattttttatgatccttaaggtcatatcactgtactagaatatttgctcgtgaaaaattcatgatgcccaaggaaatctgcctgtaagaagcagagctacattaagaacataaaagtatgaaaaaagtctgctctggtccggaaaaaaaatgagtttttcttcccacaagaaagaagtttgaattctgaatactgaaaaactctagcaaggtaggaactgtgaaaagtcttaaaaccttacactaattttagacttcttgcatatgtttattttgcttgctgagtgtttattaggtaaattaaattacttgggtgttaggtaaatctgaatttacctaattcagattaggtaagtgctggtgttaattaggtaaatctgaatggcagaaaaacttgatgtgtctattgtccctcaaaatgttatcattcctttgcaaaggaaagtccaatcacccgtgagagtgacccagaacagaagatctaatgtttacctaaatgcctaaatggaactgcctaagagaataggtgataggggcaacaacaggatttcctttaaacttctgggagtttaagtttaaacaagcccgtaggagagaaaaatatccagaaagaaagacaagcttcgagagaactttactcaatccattaaaatcctcccgttgggatagctgctaagatgtgctagaattttatcaactcagatccatatctcttttgcatagaatcactgctgctagctcacctcagccaaaaattccatgctaaaagccagggacttgtcatactgccttaatattatgatgaagttttattttatagtttcctaattctgaatatattccccccttaagcctatgactcatacttgtcagtaatttaagaaatgcattccctcatcttgaatgcatatttttgagggaaaggaaatttaacattccccattggatctgcttgttctttacactgtaaatgatggggttcatcaccgggggtgccagcaggtagatattggccatgataacatggaccagtggagaggcatgcttggcaaagcgatgagtcatagatacaccaaccatgggaatgtagaggaccaggacagctagaatgtgggacaggcagttattgagggcacggagtcgctcagcccaggtggctgtgcccaagatatttttcagaataagtgtataggagatcacaatgagcagaggatccacgataataatgagcaaggcaagagcaaatccataccagctgttgagcctgatgtcagcacagaccaggcggatcatatcctggtggaggcaataggagcgagagagaaggtgggagtggcagaaaggcagtcgcttgagtaagaaaagggagggaagaaccgccagaacacagcagcaaatgatggctaacccagttctaccaatgacttcattggtgaggatggaggcataatggaggggacagcagatggccacatagcagtcaacggacatagccaggaggacagaagactccataaaggagaatccatgaaggaagaaaaactgagcaaaacaggcctcagagctgattctacgaacgttgaaccagagaagctgcatgactgtgggtagggtggtgagggtgagacccaggtccgtcagggccagcatggagagaaacagatacatgcgctggtggacagatggctctgtgcgaatgacagtgaggatggtggtattgcccatgatggagatggtgtagagacagcagacggggatggagatccagatgtgggaggcctcaaatccagggatgtccgtgaggatgaagtagatgccttcttgtgtggtgttagtcacctgggacatgactgatgaatgtgtcttcagattcaggatcttcactcagggagaaaaagaaacattagaaataatatctctttgccccatttaatccaaattctacacaaataaatgttcagagttgttgagggtaactaaagcaagatttaagaacattgtgatatatgatatcctttccttagcccaattctgcagactgctcccacacagctaatcttcccttgatgacggaatatatattaattcatgggtaactctaatttttcctgcccccattttcccactcccattcagttttcagcacatttaaatcagcctttcatacaaatctcactatcaatactgttctcacaaaggctaaaaatgaactctattgtataaatgtgatgcttaatattcaatctttatctttttttgatataaatccagtgtctttttccaaatatctcctttgacttttgtagcagcattctcacctatttcactagttctaaacctattgctactttttcttcatctcctaattttttcattcattaaggttttattactgtactgcagtctatttctactctgtcctattctcattagctaatgtcttctgatattgattttatttctatgacataaaaaataactggaaataagggaggaaacataggaaagaagagaaagagaggaaatagtcagaagtctgtttaacagcccaggtgaagacaatcacatttattgagtactatctacatttaggcactgctttaagtggataactcgtattaattcttatgttctaacaagtcatgtgcccttttctttttcctgatgattcacagaggagtcttacctgtggtttctcctgccttggaggtaccctcgtcaccatctgtggcttctgttttctcagcttagctcagagagcaggtgcggtataagccccttgcagatctctagtctggagggtggaaggtgtggcaggtcgcttcaggattacacggaggcatcgcatcttgggacctgggtcccacagggagcccagtaaatcaactctggtggtgacagcctttgctgcccctggtgtcctcacagagcaataagttagaaagccatattgaatcacagtttcattagcttgttgaatgtgatttgaaactgcatgcttaagcttgaactgtacaatctctcaaaaattagttctaaaagacttccttctataagtactccgaagctgggatagagtttacaggggcaagagagctgtagttgaaagaaatattgtgcatcaatttcaaggggcattcatcttaacctgagcctctggaaacactaagaaaaaagaaatgtttatatatatgtacaagaaataaggaaatgaagacagaaatcaaaactgaattagaaaaaaaattattcaatagttagctatttggtggttcatctctcaattcccacaaaactaatttcaaaatgaattaagtaactaaatgaaaatcagtgacaaaaaataaaatagagaaaataatataagcatttaaatctttcctttgtgaagactttgtaaatagcagcaatagacaagaatcacagagaaagacaagtagatataatctttaaaagtgaaattttctctgtagcaaaaaatggtaaaatttaaacatttcaaaaatatttataaaaatatggaagagattactatcttaaatatcaaaaattaaatatatcaatatttatcaagaaaaatacaatagattaagaaaaactatatgacaaagttaacagtaaaagaaatacaactacaaagaagcataaaacaatgttcaactgcatccaaaaatgcaataatggaaagttaaatcgtataattggtgttttaaactttcaaaataacagagaaatttttatgacaacatgctatgcaaataaggaaatggcagtgtagaaacattcatactttcttaagtgtaatttgtatgttaatttctggaaaatgattcgatcatagatgccactttaattcagtaaatttacttctggtagtaaatgataaaataattttaaataaggataaaaccttttaatgaaaatagacttttatgtaataacaaaagagtagaaagagataaatggttcaaatattaaaaggcctatatatctatcacctatcataactaaaataaatatgcaacatttgttttcaaaagattataattagagcttatgtttctattaagcacattgaaatgtaaatagaaacataagctctaattataatctttatatatgtgcttacattctattgtaatcatattacaatagaaatgtgcttacctgtgctggaactatggtagttgctataaaaataatttcagttagtgctaataatgacccttggaaaaaggagctattatcatgcccattgtatataaactgggatttaaagaggttatgtcccttgccaaggtttcagattttgaaaaagagacaggaaaagtatttgaagtatcatcgtttctcgatgtgagaggttgtttccaggagctctcctggatagcaacatctgtagatgttcatgttccatacctaaaatggtagtgtttgcatgtagcctatgcacatactcctttatgcttaaataattttgaaatcactcatcatgactgatacaatataaatgctgtgtaaataattgatattctatattgtttagggaataatgacaggggaaaataatctgtgcatgttcagtgtagatggaagttttttttccaatacttttgacccaagattggttgaatccatgaatgtggaacccacaaatacggaggaccaactgtagttctgttgaattccaaagccaaagtacattaccactatgttcttaaaagcacttcttttctctaggtgtgcctgataactccttattacctgagatgctaaagacattttcattcctggatatagatataaattgggcactatgagtaaagcattagcttgtcatcatgattttgggatgtctgtgacacacaagtgtgcccccaaaagtctcattatggcaaacatagagaagataagaaatcttacatcatttcaaagataaaggggaatattttagacaatttgaaggagagtgaagatatatcaaaagtaagtcctcagatgtcatactaggatatagaattcatatacctgcacatgactcaaaaaatgagcacatgcctcaagaaataatcagaaactgccctattaccgatatcaagaaacactcaccaaagtatactgtggtgtctcaggaacttctagtgagaccagatgatgctttttttttttttataatacttcaagttctggggtacatgtgcagaatgtgcagctttgttacataggtatacacgtgccatgatggtttgctgcatctatcaacccgtcacctacattaggtatttctcctaatgctatccctcccctaaccccccatcccccgataggctcgggtgtgtgatgctcccctcgctgtgtccatgtattctcattgttcaactaccaattatgaatgagaacatgtggtgtttggttttctgtccttgcgatattttgctgagaatgatggtttccagcttcatgcatgtccctgcaagagacatgaactcatccttttcatggcggcgtagtattccatggtgtatatgtgccacattttcttaatccagtcgatcactgatggacatttggattggttcggtgctttttttgtttgtttgttttgtttttctttttgttttgttttgttttgtttttattattattatactttaagttttagggtacatgtgcacaatgtgcaggttagttacatatgtatacatgtgacatgctggtgcgctgcacccactaactcgtcatctagcattaggtatatctcccaatgctatccctaccccctccccgcaccccacaacagtccccagagtgtgatgttccccttcctgtgtccatgtgttctcattgtttaattcccacctatgagtgagaatatgcggtgtttggttttttgttcttgcaatagtttactgagaatgaggatttccaacttcatccatgtccctacaaaggacatgaactcatcattttttatggctgcatagtattccatggtgtatatgtgccacattttcttagtctatcattattggacatttgggttggttccaagtttgctattgtgagtagtgccgcaataaacatacgtgtgcatgtgtctttatagcagcatgatttatagtcctttgggtatatacccagtaatgggatggctgggtcaaatggtatttctagttctagatccctgaggaatcgccacaatggttgaactagtttacaatccaaccaacagtgtaaaagtgttcctatttctccacatcctctccagcacctgttgtttcctgactttttaatgattgccattctaactggtgtgagatgatatctcattgtggttttgatttgcattcctctgatggccagtgatggtgaacattttttcatgtgttttttggctgcataaatgtcttcttttgagaagtgtctgttcatgtccttcgcccacttttggatggggttttttttttcttgtaaatttgtttgagttcattgtagattctggatattagccctttgtcagatgagtaggttgtgaaaattttctcccattttgtgggttgcctgttcactctgatggtagtttcttttgctgcgcagaagatctttagtttaattagatcccatttgtcaattttggcttttattgccattgcttttggtgttttagacctgaagtccttgcccttgcctatgtcctgaatggtaatgcctaggttttcttctagggtttttatggttttaggtctaacgtttaagtctttaatccatcttgaattaatttttgtataaggtgtaaggaagggatccagtttcagctttctacatatggctagccagttttcccagcaccatttattaaatagggaatcctttcccattgcttgtttttgtcaggtttgtcaaagatcagatagttgcagatatgcggtgttatttctgagggctctgttctgttccattgatctatatctctgttttggtaccagtaccatgctgttttgtttactgtagccttgtagtatagtttgaagtcaggtagtgtgatgcctccagctttgttcttttggcttaggattgacttggcgatgcgggctcttttttggttccatatgaactttaaagtagttttttccaattctgtgaagaaagacattgttagcttgatggggatggcattgaatctgtaaattaccttgggcagtatggccattgtcacaatattgattcttcctacccatgagcatggaatgttcttccatttgtttttatcctcttttatttcattgagcagtggtttgtagttctccttgaagaggtccttcacatcccttgtaaggtggattcctaggtattttattctctttgaagcaattgtgaatgggagttcactcatgatttggctctctgtttgtctattattggtgtataagaatgcttgtgatttttgtacattgattttctatcctgagattttgctgaagttgcttatcagcttaaggagattttgggctgagacaatggggttttctagatatacaatcatgtcatctgcaaacagggacaatttgacttcctcttttcctaattgaatactctttatttccttttcctgcctaattgccctggccagaacttccaacactatgttgaataggggtggtgagagagggcatccttgtcttgtgccagttttcaaagggaatgcttccagtttttgcccattcagtatgatattggctgtgggtttgtcatagatagctcttattattttgagatacgtcccatcaataccgaatttattgagagtttttagcatgaagggttgttgaattttgtcaaaggccttttctgcatctattgagataatcatgtggtttttgtctttggttctgtttatatgctggactacatttattgatttgcatatattgaaccagccttgcatcccagggatgaagcccacttgatcatggtggataagctttttgatgtgctgctggattcgttttgccagtattttattgaggatttttgcatcaatgttcatcaaggatattggtctaaaattctcttttttggttgtgtctctgcccggctttggtatcaggatgatgctggcctcataaaatgagttagggaggattccctctttttctgttgattggaatagtttcagaaggaatggtaccagttcctccttgtacctctggtagaattcagctgtgaatccatctggttctggactcttttcagttggtaatctattgattattgccacaatttcagctcctgttattggtgtattcagagattcaacttcttcctggtttagtcttggcagagtgtatgtgtcgaggaatttatccatttcttctagattttctagtttatttgcatagaggtgcttgtagtattctctgatggtggtttgtatttctgtgggatcggtggtgatatcccctttatcatttttcattgcatctatttgattcttctctctttttttctttattagtcttgctagctgtctatgaattttgttgatcctttcaagaaaccagctcctggattcattaattttttgaagggttttttgtgtctctatttcctttagttctgctctgattttagttatttcttgccttctgctagcttttgaatatgtttgctcttgcttttctagttcttttaattgtgatgttagggtgtcaattttggatctttcctgctttctcttgtgggcatttagtgctataaatttccctctacacactgctttgaatgtgtcccagagattctggtatgttgtgtctttgttctcgttggtttcaaagaaaatctttatttctgccttcatttcgttttgtacccagtagtcattcaggagcaggttgttcagtttccatgtagttgagtggttttgagtgagtttcttaatgctgagttctagtttgattgcactgtggtctgagagatagtttgttataatttctgttcttttacatttgctgaggagagctttactgccaactatgtggtcaattttggaataggtgtggtgtggtgctgaaaaaaatgtatattctgttgatttggggtggagagttctgtagatgtttattaggtccgcttggtgcagagctgagttcagttcctgtgtatccttgttgactttctgtctcgttgatctatctaatgttgacagtggggtgttaaagtctcccattattaaagtgtgggagtctaaatctctttgtaggtcactaaggacttggtttatgaatctgggtgctcctgtattgggtgcatatatatttaggatagctcttcttgttgaattgatccctttaccattatgtattggccttgtctcttttgatctttgttggtttaaagtctgttttatcagagactaggattgcaacccctgcctttttttgttttccatttgcttggtagatcttcctccatccttttattttgagcctatgtgtgtctctgcatgtgagatgggtttcctgaatacaacacactgatgggtcttgactctttatccaatttgccagtctgtgtcttttaattggagcatttagtccatttacttttaaagttaatattgttatgtgtgaatttgatcctgtcattatgatgttagctggttattttgctcattagttgatgcagtttcttcctagtctgaatggtctttacattttggcatgattttgcagtggctggtaccggttgttcctttccatgtttagtgcttccttcaggagctcttctagggcagacctggtggtgacaaaatctctcagcatttgcttgtctgtaaagtattttatttctccttcacttatgaagcttagtttggctggatatgaaattctgggttgaaaattcttttcttaagaatgttgaatattggcccccactctcttctggcttgtagagtttctgccaagagagctgctgttagtttgatgggcttccctttgagggtaacccgacctttctctctggctgcccttaacattttttccttcatttcaactttggagaatctgacaattgtgtgtcttggagttgctcttctcgaggagtatctttgtggcgttctctgtatttcctgaatctgaatgtttgcctgccctgctagattggggaagttctcctggataatatcctgcagagtgttttccaacttggttgcattctccccgtcactttcaggtacaccaatcagatgtagatttggtcttttcacatagtcccatatttcttggaggctttgctcgtttctttttattcttttttctctaaacttctcttcttgcttcatttcattcatttcatcttccatcactgataccctttcttccagttgattgcattggctcctgagacttctgcattcttcacatcgttctcgagccttggctttcagctccatcagctcctttaagcacttctctgtattggttattctagttatacattcatctaaatttttttcaaagtttttaacttctttgcctttggtttgaatttcctcctgtagctcgtagtttgattgtctgaagcctttttctctcaagtcatcaaagtcattctctgtccagctttgttgcattgctggtgaagaactgcattcctttggaggaggagaggtgctctgctttttagagtttccagtttttctgctctgttttttccccatctttgtggttttatctacttttggtctttgatgatggtgatgtacagatgggtttttggtgtggatgtcctttctgtttgttagttttccttctaacagacaggaccctcagctgcaggtctgttggagtttgcttgaggtccatgccaggccctgtttgcctgggtatcagcagcagtgtctgcagaacagtggtttttcgtgaaccgcgaatgctgctgtctgatcgttcctctggaagttttgtctcagaggagtatcaggccgtgtgaggtgtcagtctgccctactggggggtgcctcccagtaaggctgctctggggtcagggatccacttgaggaggcagtctgcccatcctcagatctccagctgcatgctgggagaaccactgctcttttcaaggctgtcagacagggacatttaagtctgcagaggttactgctgttttcttgtttgtctgtgccctgcccccagaggtggagcctacagaggcaggcaggcctccttgagctgtggtgggctccacccagttggagcttcccggctgctttgtttacctaagcaagcctgggcaatggcgggtgcccctcccccagcctggctgccgccttgcagtttgatcgcagactgctgtgctaggaatcagcgagactccgtcggcgtaggaccctctgagccatgtgcaggatataatctcctggtgggcagttttttaagcccgttggaaaagcgcagtattcgggtggcagtgacccgattttccaggtgccatctgtcactcctttctttgactaggaaagggaactccctgaccccttgcgcttcccgagtgaggcaatgcctcgccctgcttcggctggcgcacagtacgctgcacccactgacctgcgcccactgtctggcactccctagtgagatgaacctgatacctcagatggaaatgcagaaatcacccgtcttctgcatcgctcacgctgggagctgtagactggacctgttcctattcagccatcttggctcctcccggttcgatgctttttaatgctttcactgttaatgcttcctggagccctgaaaagaccaggcatctaggatttactcaagaagatatagtcatattctggcaaatgatttgcatatcagaaggactaccatatctgtaaagatccacagagtgtaatgtcccttgagcagagaagcttgaatttgaggaggaggagagaaaggtctgtgctgttatattagttttctgtggtgaccagagcaaattacctcaaaagtgatagcttaaaacaacattttttgttttttaatcttagagtccgtagttcagaaatctgaaatagatctcactgggctaaaatcaagagattggctggaccaccttgctttctcaaggctttagggaaaacccattttcttgccttttccagcttgtagaggccaaccacattcctggatttttagtcaatttctctctctacaaagccagcaacttcaggctgagtccttctgacattgccttttctctggtacacttctgcctcttaggacatttcccttcaaaggacactagtgattatgttgggctcacttgattatgcaggactttcaccttattttaaggtttgctgatcagcaaccttaattccatctgcagccttaactgcccttttccatgtaaaccaacatattcagaagttccagggattaggatgtggacttttcttacaggggtggagacattatttggtctaccacaattatgttccttttaatcattctgaattcccatgaatggggacttatttcattttccattcattaatgtattattagaaatacagtcatgtgtcacttagcaacaggggtatgtcctgagatatgtgttgttagtcaatattgtagttgtgccaacatcatactgtactcacacaagcctagatggtacagcttactacacatttaggctatatgatgtagcctattgctcctaggctacaaacatgtacatgttgctctactgaatactgtaagcaattgtaacacagtgatatttttgtatctaaacatatctaaacatagaaaaggtatagtaaaaaatgctacaacagataaacaatgatacacctgaatagggcatgtaccatgaatagagtttgcaggactgaaagttgctctgagtgaatcagtgagtgagtggtgagtggatgaaaagtcctaggacattactgtttgctattatggactttataaacactggacatttaggctatgctgaatttataaaaaatagttttctttcttcaataataaattaaccttagcttactgtatcttttctactttatatactttaactttttgactgttttgtaatacagctaaatccatgaatgcattgtacagtggtacagaaatatttttttctttacatccttattttacacattttttatttttaaaatttatgtatttgtttttactttttaaacatttttgttaaaaattaagacatggacacacacattagcctagacctacacgggatcaagatcatcagtatattgttttccacttccacacattgttccactggaggatcttttggacaataacatacatgaagctgtcatctcctaggataatgatgccttattcttgaatacctcctgaaggacctacctgagtcttttttacagttaactttttttttctaagtagaagaaatactctctcaaataacaataaaagtaaagtatagtaaataacaagtgataggatttttcactttcattataatctatggaaccactgtcctatatgcagtccgttgttgattgaaaagtcattatgtgaaacatgaccgtattttactattcttttagtgattatctcgtagataacaaattgcatcttgacatcttatcgtctactataaattaccatttttcaattttcccagtaatgctagatagaagctcagaactttaaaaactcaaatgatatctctttctttttgcatgattcctgccacaattatagttcaaagaatgtttaaaccccaatacaacatgagtattattgtttttttcagtcagtgtttgctttcttctacatatttaccttttccgatgcttttaatttcactccatatttctgtgcttgtctctgggttcattttccttttgactaaagaacttatttgatataacgcaggtttgctgctaacaaatactctcagtatttgcttatctgaaaacttctttactttttcattttaaaagaatattttcactgtgtatagaatgggatgttggtggttattttacatatataaatctattatctttcagtgtcttacatttctactgagaagccagctgtttgtactatttttgatcatttaaagatgagacattttcctctgactgacttcagtgtatttctctttgttactggtttctgttaatttaaatatgatatgcttattcagggctttcataaactatgtggaccttcttggatatatggattgatgcgttttaccagtttaggggaattctcaaccattatctcttgaaatagtgcttctgtacctccttttcctctattgtttaagtttccatgaatgttacatttttaaaatatgtcctacatgtatttcacgtctttatattttcaatttttgtgctttatattttcaatttttgtgctttcatttggctatttctattgacttgtttttcttttcttggaagagctttctgttgcctttaatattcttttaaatgcatttattttgatagatttttttttagttctagaatttgcattgaattattttttaatattttccgattctttggtgaatttttccattatttcatcagctttttcccattttcctttactttttgaaaaatactaattggatttactttagttaattcaaagttcttttctgttctgctggtgtgtctttttccctctgtctgggcaaagcccatatcctcatccttttcctcttgcagagaattgacatatgcctccagggaaagaaaatggctctagatgtcagtttacctctccaaggttctccactctccagaatctgagagggcaacctgttgttgcccttgcttcctagcttcctagcttcctaatgcctttgaacacacacagacacacacagtgattttaaaatatgacttttctagttattttcagcaggaatattggtcttccatagactacaacatcctgcttagaagtcagggcatcccttttaaaaaaggttagtaccaccaagaacatacctatagatcaacaagttgggtttattacttttagtgatgaagaatgcacaacatttggaattaggagggtgttacaaaaatattattataggttatgggcttgtttttggtgattttgaggaaggcttaaggatttgatgcttttctatgaattaaatgctttcaggaagtaggggaaattttcctttgataacttcataaatcttgtctacagaaagtgagattaaggctgagttgataataaatctggagtcactctcattaactgagggggagtgcttggtgttttgaggcttggacattgtttatgtttggattataaaatggtcttttttttctggatacattgtgatcacaggctggtcttgtatgttattgacattctgaatggtttatatttaacaaaagaacaccaaactttagctgtgagtgccagaccagtctctagctaatagcaccagaccaccaattggatgtcatgaatgacttctcttgttttaataaatagattgagaacataaggaattagaacagttgctgtgactgctgtattttttccaaattatatccaaggccattgcaggaaaacagcaaaggaagaaaaggaaggaaggaaagaagggagaaagggagggagggagggaggaagggaggaagggaggaagggaaggaaggaaagaattttgacagtgttaagctaggaggtttttcctaatacatgggataaaataagatatcacttagaaagcaattattgggataaaattaaaggatgaggaagggactggagtgagcaaggaagagtaataatcattatagatggatgaagcagcttgctgtaaacagtgaaagctaatttggaactgcagcaaatgaaagatatttgatattgctgtagttcagagagaaaaagagtgatgtaagatgtagcttcagggacggtcagtgaaaaattgaaaaaggtatcataagccctgtgaaaatatgtttttggggagggaagccagaattattgaaatatagactgaaagtgaatattttcaaaatatattctctcaaatcttttgaaatttcaagcatgtgaatgtttaacctttgtcaataacattttattaaaatgtggatacaaaattaatcattattgataggaaaaatggcagagaggaaatatatggtaattaaaaataaattatttgcttatttgaagagaatgaaggatattttgaataacattgaaatttataaagtacagatattaaaagtgtacccatgagaatagaagtacagtttataactccagaataaacaggggaaataataaaaaaaaaaaaactgatggaagacagaaaaggagaaaaatgtgtaaatcaaaatatgtaaagcagataaattgaacacatgtatttattcaggtattaatacaactattaactcatggtgaatagcataatgtgtgagaaatcaaaagcgggtgagaaatcttcaaaaaatgaaaatgggaagcacatggatgtgtgtgacaactgattttgcagagcaaagagatatagagcccaactgattacagaggaagaagtgaacaagaaaccatgcaattctgcgaagtcagaaagtttcatgtatttaaggcagctgaaactcaggaagaggggatgataccatgtggaactcaatgcaaaagacttagtaaaagtcaatgtgtagagattcactcatcaccacacaggcaggtgattattattatatgctttttaattggcatagaatattcatagataaaagtgtccatcttctaagtatatagctcaaaaattatcacaaaatgaatatatcctgtaccctcaatacagatcaagaaatatgccccacagtactgtcagttttggtaggcattctccatgcacttaaaaaatgggtagtacataattgttattttcttgctttttaattattaataagatcagtatttttaatgatgtttttcaaatcttttaaatcattaattttgtggttttgggctagttgtgttatttactagaaaaggtgtagtacaaattttcactgtcattatgcatttgagtacttatttttgtagctctgacagttgtctccttgtactccaaccctctgagtttgctgtaagctcttcttatttactcatctattacttttaaattgatacattccttaagggaaaaaatctcaataaatatcaggctcacttctctaggcttcccttctctttggaatcttgatctttacatcctcattgccttgaatgctctctcaagtcatttaaaactatttctatatcttttctaattgttcttggcaggagaattggcttgaaacaaactcatattcactggataaatgtgaaagtgtttatttagtgtcctaatttttaatttagctccatgcttagctgaatataacgacttataactttgtcttgttgagaacataaaacgtagttccaaaggtataaattttaagttagcatagaatataaaggtagaaaatcccagggagccatcagattctgcttattacacaatttcatagacaccaagagattccaagattcttttcactgtgtgattttctaggattcttcctgaacctgatgttgtctctgagactggacttcaggataaagattggaaaaaatagaattgggaggagcattacatataaagaaatccattctagaatgaagccgaagatattcagtaaattggctataatctgagaaacatctaaggagaagttatctttacagaacttcagtatttccaatggccatacatttactaaatatagcaataatatttaagaaggctgagaattcactatgcaatctcagaaagaaaatggaaatgacttcctaagattctcattttatgttaagccatttaacaatctggtcctaacgtcttttcctgtacctccctagttgtgggacatctttttacagatactctaatgttactcagatgtttcttctcttctcatctcaggaaataatcactgtcttatttatctggccattgatgaaatgattcttcttgtggatttacttgcttggtttccattgataatttggaggcattgtcctctatggagttgtgtcacctatcagcgggctattaatttagggtatggttatagacaactgcagatccccaggtcagaatctctagaaacaggatacatggaaacctggaggcagactcacaccattaactgtgcaagaaattaagacttcttgtaaaagcactctttgtcaattattgacatctttacaatgcagaatgcaagcaaactatttaaaatgtttaaatttatattcagaagctttataggtgtgtcgttatttgtataagaagcattataaggccaatttaaaagttttttctaaacaacattccagaaagtgaaatgtacagcagagatagagaatgtagaaaaaaaaaaaagttctttctaagttctttgagtggaagaaaccttgtatcttttgtcactgctttatctctagggtctagaagtatacctgactcattgagtatgctcaataaattctacttgactgactactaatgagatcaaaggctttatttcttgcttagttgacataatttaggcattaagagctcagactctgaagtcttacccaggtacattccaatgctaggtcttagatgcatagatttgagcaagatgtttactgtatgtaaacatcagtttttcatctgaaaagtaataattacattaatcctatttcttagagttgctataggaagtgatgaaaataataaagttcttagtatatattttatgttaaaaatcttaatttctttccctgaaaatgtaagtataaacgctttacatcattttaaatgcctgcaaaagagcatccaacaaggtagaaaatatgaatgtctacaaagaggatgcttgcctctttaagagtttctgcaacggtgggttcttggtcttggtgaattcaagaatgaagccgaggaccctcaaggtgattgttacagttcttaaagatggtgcgtccagagtttgttccttcagatgttcagatgtgtctagagtttcttccttctggtgggttcctggtcttgctgacttcaggagtaaagccgcagacctttgcattgagtgttacagctcttaaagatggtgcatctgcaggtgttcattcctccctggtggattcgtggtctcgctgacttcaggagtgaagctgcagaccttcgcagtgagtgttatagttcataaaggtagtgcagacccaaagagtgagcagccacaagatttattgtgaagagcaaaagaacaaagcttccacagcgtgcaaggggaccccaggtggttgccgctgctggcttgggcagccagcttttattcccttatttggccccgcccacatcctgtttcttggtccattttacagagcactgattggtccattttacagagtgctgattggtccattttacagagtgctgatcggtgggattttacagagtgctgaatggtgtgtttacaaaccgttagctagacacagagcactagttggtgcgtttttacagagttctgattggtgtatttactaatctttagctagacacacagcgctgattggtgcatttacaaccctttagctagacagaaaagttctccaagtccccacccgattagctagacacagagtgctgattggtgtgtttacaaacctttagctagacacagagaactgattggtgcatttacaatccttagctagacagaaaagttcttcaagttccgccccccgccctccccgccccatcccctccccccgcccccgacccagaagcccagctggcttcacctctcacaacctggatgggagaatcccagaattttgcataataaacaagatttgtagtcttcaagacttccaagttggggccttggtgaggttgggtgaatgccacatcatagcctgtagtggaagcctcctttgaactagctggtatgtttctctcctattgaattcagagagcaataactgaagacaatgtaatacatttcacttcctctcttcctagcacagagggctcaatagatttcccattacaccttctaactcccaggtgccttttcctcattaggagtgctgtgttacaatcttttctgcattcctgctccaggtatgcaaggtaatgaagaaaacctcataccacatgttttaaaaaagcctcacttttgtgtactgttctgtcacacataattcacctctacctgcaccctcacctcagttcatggacagactatagagaacttcctgttagacgccatgttttaaggtgatatcaatcgcataacatgcaatctagggccacctgttattatagagagcaagcaaacaaacaaaaacatttcttcctactatggtttttggctacactctgcgtcttttctctaatagcattcggacaatggcaccatggatctccttggtcttaatgctgtagacaataggattgacaacaggtgggaagaagaggtaggcattggccatcatggcttgcagcagaggggacacacgatgtccaaggcggtgcactatagacaagccaatcataggcacatagtaagcaagcacagcacagacgtgtgagccacatgtgttgagtgccttcttcctcccttctccagtggcaatacccaatacagtgtggagtatgagcccataggagatcacaatcagcaacgaatccagcccaaaagtagaggtaacaatgaaaatcccatagatattgttaacagaaatgttcccacaagatagataagattggggtgcagacaataggaatgtgagagggcattgtggccacagaagggcagacgccataagagaatgggcaacggagccatgagcataatgcttttcagtacgataatagctcctgtgccaaagaccctgggcagtgtcaggatagctgtgtagctcagtgggctgtagatggctataaagcggtccaaagacatggccagcagcacagctggctccatcatggataaagaatggatggagaacatctggaaaaagacaagcttcaagactaatttcagtatttccaaaaaggaatatgcctaacactgtaggcagggtggatgcagagacacgaacctcggccagtgccaacatggcaaggaagaggtacatgggttgatgtagggcaatatctgttctgatgacgtgaagaatgatgccattcccaaggaaaatgatgatgtatatcagggagaaggggacggatatccagaggtgctctgactccagccctgggatgccaaccaaaatgaaagtcgtaggtaaaaaccccaaagagttattagaaattttcatgttgacatatcatcctcagggatcagtgccaccttgaaaattagaaacaaactagtgagatgacatcattatgaagaaagacaactgggcactgagggaagggaagaaaaaagcaaactcacagatttatgtggccaaacttcttatttctaaaaactgacaaatgaccaccatcaagaaatttccagtatggagagtgctacagcttctgtcataggcagatagaaaattatgttctagaaaattatattacattataggcagaaagaaaattatgtgtctgatcaggtgcagtggctcatgcctgtaattccagcactttgggaggctgatgtaggcagatcgcttgagcccaggaatttgagaccagcttaggcaacatggcgaaactctgtctctactaaaaaaaatacaaaaattagccaggcttgttggagtgtgcctgtagtcccagctacttgagaggctgaggtgggaagatcacttgggcccagaaggcaaaggttgcagtgagccaggattgcacgcctacacttatgcctgggtaacagcatgagacaaaagaaaaaggaagagaaaagaaaagaaagaaaaagagaacagcaagcgggagggagggaaggaggaaagaaggaaggaaagaagagaggaaagaataataaaagaaaaggaaagaagagagagagagaaagaaaaggaaggaaggaagagagagaaaaggaaggaaggaaaaagaaaaagcagaagaaaaagagggaaggaaggaatgatagaaaaagaaagaaaagaaagattatgcatttaaggtgtagtgcaccttggatcaacttagagagaaatgactgccttgagttggtgtggagatgtctggccctaaaaagctgctggggagacagagaaatgtaagcaatcccaaaataagatatggaataatatcaggaataggtgaaaatattttattggtaaatatacaaagacaaggtctatagcatggtatataaaaagagctaaaaattacctgaagaatgaatataattgtatgaataattaagcaaggctgagatagtggcagtggccagagcctggagcaagtggcagagaattaaactagaaaagcatagaatttggacccacactgggctagctgtcccatgttttgaaaattctaggagtcaactagaaagattatgtgcaaaggcatggaagattcaggaaggagaaggaacctacgttcgtggatgtgtgtgcagactttaaggttcatgaaaatattctgtcaacgatcacatccacaatctgttgactcaacagttctcaaagaaacttaccttatccattgggactttttctttctagctcagacacactgctgaatacactacggcaacaacagtggaaatctaaacagattttcaaggatgttcttttcctggggaggagaggaaggcaatagagggaaagagaaaaccacctgcctggattgggtgtgttttgagataagcattgtctaggtcagcagttataacattagaatcctagactagcatggtaggaaggacctctgaagattgttttcaactcattcacccaaatgcacacaaacacacacagacacacctgcttacctattcacacacgaacaaacatgcttcccgcatgtgctgaaaatctgattcttgtatgaactttccattcagccactgctgaacttacgcatcaacagggacctcactattccgtaatggttattatgaagttcttctttgctctgcagatctataaccagtgagcacacctctatgtcaaggaccttgcaggaccaaggcaacacagagtcctagacctactcagaaaatctctgcaactttcaaccacagctcacagagaacaaatcttcttccacagatattcaaatacagtcgtcacctatgctgaagtcttatctccaagctggttgcaattatattaagtactacaaaggaaatgttcaagatactttgagagggtcctaaagggaaaaacccaatttattcttaaaagtcaggaaaagctttccttggaaagtggcatttcagctaagacctaagaattagtagaaaatttccaggctaagttgcatgcaatgtagtgcaggaaaaaaaaaagaggggaaattatcatggcagtggcagtgggcatataatatggcactttgacaaaaactaaaataaaatatggagaaaataaaaactgtagatgtaataggatattaaaataatttattttttcatatttttgctatcatgaaaatatggaaagaaaaaaattaattgcctgactaaatagactaaatacaagatccttggacacttaccatgctctgatacaacgtaacatagtagattatcagcttaggaaaagctctgtgctgtgggctatgttaaaatgtagggcagggaaattcaggggcaaattattgaccttaacaaatgatcacacatcagaacatcttatggctgaaaatgagaaacatttctcttctgcattcttatgcccttatgttccttcctcacctccaaaagctcaacatagccttcttagttctttaaatagaccaaatattgatctgcctctggattgagcagctgttcttcccgtgtgctgccttactgaatccttgatcccactgcaccctgtatcttgcctgccacacctcaaataaccggatattggaagaaacaaatcttgactgatacttgaaactagagtctctcctcctctgccttctctgcctgtctgtggtctcttttgttttcttcctttttttttctttcttgcatttttttttttttgcatccttctcagtttccatctccagagtctctaccgccagataagggtcagatctccttgaaagagatcttaaaacacaatcattctcctgagtttaggatttgtttgacaagagcattttagcttgaaaggttacaaaagggatcatgtagtctatagcccagtataataggacacaacaaatcagaaaaaaagtagaatgtgggacagtgatgactgtacccctggagctggacagaattggaggtgaatcttatgttcggtataactttacgtactttacctttgtgcacattagtatctttgtttttaaagataaagatgttaatacttacctcagggactggctctaaatatttaatgtgagcctttagcaaccagtgaatgttaatattctctccactctatatctctttcaggaattctcaggagtcaatcacagtcagcttatttccaactttttattaataattgtctttccttgttattggctcactgatactcagaccacatctgtgaggtaaacaaggagacaagaatttcccacttaatagatgagcatataaaccagacataagcattttgtgagtaacccaagataatatgatggcaaaactatttcaagaattcatgatgtgctctggtgtttttgttttgttttccatctgccaccaatttaggatgtgattcctctccttctgccagacaggttcaagaagctagggaggtgactactgtcttaggaaaaatgctaagggcttcacactgtgacatggggttgggagtcctgaatgctgcttcagaaggcagggcttggggattgtattagttcattctcacactgctctaaagatactacctgagactgggtaatttattaacaaaggaggtttaattgactcacatttccacatagctggggaggcctcaggaaacttacaattatggcagaaggagaagcaggcacatcttacttggtggcaggcaagagagagtgagcaagaagagggaaaactgccttataaaaccatcagatctcatgaaaactcactcagtatcacgagaactgcatgggggaaactgctcccatgatccaataatctcccacctggtccctcccccgacatatagggattatggggattacaattcaatatgaaatttgggtggagacacagagccaagccatatcagggatcatgggcttgtgcactcaccacaagtgaaactggcctctgagcctcaggtgggatggggaagctcacttcagcaagtccctgccactgtggcattcatatcttcttagtcctggggctggaatgctgcccattttttgaaaaagctgatcagagtctctaggagtagagtaatggggagaaagttaggttccctgaggagcaattacccaggtaattacattagcctctctcaatatccagagaacctaagggaaacaagcaaagatatagagtcagtatctttgtgaaatgagtgtaatagtatttatccagcatatttaaataactaatatatgtaaatttcttttttctaacttattttttgttatacttttaagttttagggtacatgtgcacaaggtgcaggttagttacatatgtatacatgtgccatgttggtgtgctgcacccattaactcaccatttaacattaggtatatctcctaatgctatccctgccccctcctcccaccccacaacaggccccggtgtgtgatgttccccttcctgtgtccatgtgttctcattgttcagttcccacctatgagtgagaacatgtggtgtttggctttttgtccttgtgatagtttgctgagaatgatggtttccagcttcatccatgtccctacaaaggacatgaactcatcattttttatggctgcatagtattccatggtgtatatgtgccacattttcttaatccagtctatcattgttggacatttgggttggttccaagtctttgctattgtgaatagtgccgcaataaacatacgtgtgcatgtgtctttatagcagcatgatttataatcctttgggtgtatacccagtaatgggatggctgggtcaaatggtatttctagttctagatccctgaggaatcaccacactgacttccacaatgtttgaactagtttacagtcccaccaacagtgtaaaagtgttcctatttctccacatcctctccagcacctgttgtttcctgactttttaatgattgccattctaactggtgtgagatggtatctcattgtggttttgatttgcatttctctgatggccagtgatgatgagcattttttcatgtgtcttttggctgcataaatgtcttcttttgagaagtgtctgttcatatcctttgcccactttttgatggggttttttttctcttgtaaatttgtttgagttcattgtagattctggatattagccctttgtcagatgagtagattgcaaaaattttctcccattgtgtaggttgcctgttcactctgatggtagtttcttttgctgtgcagaagatctttagtttaattagatcccattagtgaattttggcttttgttgccattgcttttggtgttttagacatgaagtccatgcccatgcctatgtcctgaatggtattgcttaggttttcttctagagtttttatggttttaggtctaacatttaagtctttaatccatcttgagttaatttttgtataaggtgtaaggaagggatccagtttcagcttcctacatttggctagccagttttcccagcaccatttattaaacagggaatcctttccccatttcttgtttttctcaggtttgtcaaagatcagatagttgtagatagacagcattatttctgagggctctgttttgttccattggtctatatctctgttttggtaccagtactatgctgttttggttactgtagccttgtagtatagtttgaaatcaggtagtgtgatgcctccagctttgttcttttggcttaggattgacttggcgatgcgggctcttttttggttccatatgaactttaaagtagttttttccaattctgtgaagaaagtcattggtagcttgatggggatggcattgaatctataaattaccttgggcagtatggccattttcacgatattgtttcttcctatccatgagcatggaatgttcttccatttgtttgtatcttatttccttgagcagtggtttgtagttctccttgaagaggtccttcacatcccttgtaagttggattcctaggtattatattctctctgaagcaattgtgaatgggagttcactcactgtttgtctgttattggtgtataagaatgcttgtgatttttgcacattgattttgtatcctgagactttgctgaagttgcttatcagcttaaggggattttgggctgagacaatggggttttctagatatgcaatcacgtcatctgcaaacagggacaatttgactttctctttacataattgaatgccttttatttccttctcctgcccgattgcccgggccagaacttccaacactatgttgaataggagtggtgagagagggcatccctgtcttgcagcctaggcacattttcattaggcagtgcagtgtggttaagagcagtgtctctgggaccagatctgtattacaatcataacttcaatagctcttcactctatgattgtgcaaagtatctgattaatcttagtttcttcatctgaaaaattgagacaattctacctactccatagattagagagccattcatatgcaattttaaatggagtacagttagaagcaaatactcaatagacacattttattagttgtactttccagcattccagtgagcaatgttgcagtgagctctaagaaaagattgaaaaataatctgacaacaatgaagcgtaaggtatttggagtgggaagccatgagctcttgcacaggtttttggacaatccttccatatggctttggcaaagttactgaatctttctaaaccttagcttttttactatgttgaaagatttccacatgggccctgcctcttttcgagagaaatgattaggtttaatggggctgtggaggaaagcactctgaaatgttagaagcttcatcaattggagcaattgctgagattatgtttccttgcctgccacaaccctgtatcattctctacaaggcatagcccagtaacaagtccagatctgtcttccccatcaaaaacatcacgggagatatgatagaacagcagccctaacaacagattggccatcttcctggaagctgccctattccataaccctgcatatagtcatgctagataagggatattagagaggtcactccaatgacttcctttatccacaaaacaaaggaccttcagcaacttactggtcctttcttctctgtagcttctttctcatgcagcccttccactccatgccagcatcttccatttgactcaggatgctgttctacgtgggctgcactggcacttataaagctgtctctcttccttgggtctttggccctcaaaggaatctccctagatggacgcagacttgatgaatgtcaaagagggattagcatcctcctagaccaaagcatttgagatgcccagttatcttaaatggaaatttagtgaaccatgagtacctctaggaggtatttcagtgagccagaggatccttgactgtcttctctccccagctgccaacttcataagaaaatttattgggtgcttctcaatcctcttttttgtctttcttttcttttcccagacaaaagtccccttgagacagtctttacaaccaggtagttattcactgtcattcactgagcaagtatgtaaagatcacaagctttgggtcagatatttgaatgcaagcattaataagacacaaactctgtctttcagaaagcattgtcttctgcaggaggttgatgtgaaaaaaactaacgtcccctgatgaagcaaaaacaggcttcccaggtgatacaaatatttagcaagctttccttactaatgtctgcactatcattcaaaataggtaacattttagatagaggggaaaacatgtacaaaggctcagagttgtcacaaagcaaaacataaaattctgtgaacttcaattacatgagccatctgtgttttacaaatacagtatcaatttcaaaggcttagagaggcttgtggatattaaataacgggatagttgtaaagatttttgcctgcaggaatataggcttgtgctgaggaatgggccagatgatttaaagcagatactgtcattagcaggaatatgtacagctttggctgattttatgttttttttggtttgttgttgttgttgaatcagtggagcatagttaaaactacaagcaccacagtcagaactgtcaaacttggtataatattgggcaagatattttgtctctgagcctcagtgtacttatctgtaaaatgggtaatctagtagtatccatctcataaggttattgtcaagataaagtgacttatagtgtattatgcccttagaataatacctaggttataatatgtgcttaaaaaaccatgatatgcaaaatagaaggtactcagtaccttctactgagtttttctgtgaatctataactcttaaaatcaagtctattaaaaagtatttaatacaataattttatgttactgttttctgttgctatcttttcctgatactaaatggaaaaatagataacatattctaggaaagggaacaaaaagttagggagaagccaatgatgggacttccttcagtataacatggaaaacatggccctgaaacgagtggtcctgtttggagaggagtccagcataatggtttaagaaaatcagatgcgcttgatattgaatttcagttctgacttacattaatgatttaactaaggaaagttgctttcctctgtgagcctcagtttcctaattttaaaacattgaaaataataatacctccctacttcacaggtttggtgagaaaattaaatgaaataatgtaaaataatgaaaataaaaagtactcagccctctctaccgtgagttaaatgcttaataaacattagcatttatcatgatcataattatcatcttcattgtcatcttcagcataatcgtatataactttttatagtcattgtaaaatgctctttttagattataaaaccgaaatgtcttcttcagaaaatttgtatacggcaaagatagagaaatctatatagaaaataagattatatataacagctgtttttcttttgatacaaatatttatagccttttacatagtgattgttctgtacctaattttgcttatttttatttaatattttgccaacagtttcctaagcatttaaatgtcattttaataatagtgtatcaaatgaatatgctttgatttatgtaatatttttattctagacattttgtatgcttacattcttaaaattatgaacaataacacaaattataatattcacttattaaatagttcaacacatatttattgatcactgacctaggagatggatttagaactgtgagcaaacaggaaaaaaattttgccacaaacagcttacatcctaaatttttaatttatcatttatttaggacagatttttagaagtggcatttctgagacacagagcatgaatattttcaagtcttttgatgtattttgttttttataaaaggcaaattaaattatgttttcattctggtatgtgaaaatacctcttttaccacatacttaacagcacagatatttatttatttttctttttttttgtttttgagaaggagtcttgctctgttgcccaggctggagtgcagtggcacgatctcggctcactgcaagctccacctcctgggttcacgccattctgctgccccagcctcctgagtagctgggactacaggtgcccaccaccatgcccggctaactttttgtatttttagtagagactgggttccaccgtgttagccaggatggtctcgatctcctgacctcgtgatccacccgcctcggcctcccagagtgctgggattacaggcgtgagccaccgcgcccagccagatattgattgttaactctattcttcaatattcgtttagtaacaaattaagatatgttaatttgcattttaaatttgagtaaggtagaagttttcaaatatgttattacctgtacgtatttcctaatttgaaaatgaaatttagatgtcagtggtctatttgttaataagaggcaaaatgggacttcagtgctaatctaaatccaaatcctaaattttttgtaccccattctaccaaatgagatctatagaataggaatttcctctcaacatggagaagaatattctaagtctcggaactgctattgagtaatgtggcctactatgtggatgtaaattaaagtttagaatggaacctatgtttaaggagtgccagcctgtaaggctgcagaaactgctgggttccagaggggctcccaagcctgagagtctgataacacccacacatacaaacatgagataccacacaaacatacacaagaaaccgcacaaacatacatacatatttttagagtttggttcttttttaaatttcgctttgtaattttgtttgttttcctttttatttttgaatcggggtctcacttggtcacccaggcagtagtgtgattatggctcactgcagcctcaacctcctgggctcaagcattcttcccacctcagcctcccaggtagctgagactacagacgtgcaccgccacacatggctaattttaattttttttgtagagatagggtcttgctgtattgttcaggctggtctcaaactcctggactcaagtaatcttcttgcctgaagttggtctcaaactcctggccttcagcaatcctcccaccttggtctcccaaagtgctgggattatagcataagccaccgtgcctggcctcatggtaattttaacctgtaggagaatgggtgggaggatccagagggcctgagtaaagtagaactgggacaatgaagatataccaccttgatggatgccagcagaaaggtgtcttcttgggcttctgaatgtgaagaggaggagttcctcgagacaagaagagaacttctgttagctctggatccctctttatgtatctatatgtccacgcatacatttaatatttattgagtatatggcatgtgctaggcattgtatttatatacatttactggcgagcaagacatgcctaattcctccagggatcttgatttagtcattctaatggacacatgcacacaccttcataaacaggacattactgtgtgacaaatgttacaacgggaaatgcagggcactgtggaaggaaaccgatggagcatttggtgctttaccattggaaagggaggagctatctgtgaaaatgtccttgaggaagcaatttcaaagctgagacccctgcaaggattgcatttagtcactcgtagggacaggctgatcagccaatgtaaagtttatttcctcctgagcaatgggattgtgacttcaatatgtttgtgtgagtttccttggctgaagctttctcacgttacatgtcattgttcaatatcacacaactaaaacacctacaagtaaatactgactgtagcttaatgtcagacttgaggttgtaaggtaaaatcagagatgagaggagtcaaggataggatcaaagtctcttcttctagaggaatatggtcaggagagagcacaaccttagaaatttgggggggtgttgcttgaaacaggtgttgaggaagaatgcaggagttctgaggtttctgatgtgacttgggggtctgaaagttactgctgaccaggatagaaaaagatgagaagaaacttggccaggtagataagatggaagcagtcccaaggaaccatggaaggaggtgtatttccggaggtgagttagagcaaatggcatttacctggtctctgccaggctctcctctgggtgctctggtatttattgttctttttagtttttatttagtttcattttagttttagttacattgatgatgaccttcaataaagttgccttctggatagctttgatgctaccaaaaatgccagttctcagctgtaggaggagccattaaaatctaagcaagagaagttcagttttttaaagccacaactccagacataaatttgcccatattttatttaggacaggggcaaaaaatctttaagagcatgctatatactcaatactccaaattttcagtccaatttggggccttcttataggcctctagggggagttttagccccaggactcatttactggcctttttaagacctaggaacttgataatggcacggtggatctccttggtcttaatgctgtatatgattgggttaagcatgggaggcacaaaaaggtagacattggccataagaagatgaatagcaggtggggcatgcttcccaaaacggtgcaccagggacagccccatcatgggcacaaagaatactagcacagcacagagaggagcggtgcatgtctgaaaggcacggcgctgctcctcttgggaggccaggcctgctactgtgtgcaggatgagtccataggacagtgcgatgagcaccaggtccagcatcacagtgaaaactaccaccatcagtccatacagattattgaaggtgatatctgtgcaggccagctgtatcacttcctggtgcaggcaaaatgagtgggagaggaccacagatccacagtagggaaaagccttcaggaggaggacaatagggatagtggccacaggtccccggaagatgacaattaggcctgctctgaccacttgctggccagtgataatgaccgaatacctcagagggtggcagatggccacaaggcggtcaaaggacatcatgaggagcactgaggactccatgaaggaaaaagagtggatgcagaacatctggatttgacacgctccaaagtagatactatgggagttaaaccagaagatccccatagtggtgggcaacgtggacacacacagccccaggtcagtgagggccagcaaggatagtagatagtacatgggtgtgtgcagacgagggttggtcttaataatgatcagaatgaaacaattgcctgagatggcaaccatgtacataaagaaaaaggggatgaaaatccagtgtttgatgccttccaatccaggaaagctggtgagatagaatatggggctaaactgagtaatgttggatagcagcatgaattgaggactgagcgaatattggactgacattcctcggggattgagctgaaaataaatggatatttctggttattaattcttcagcttcactaacattcacaacatcacaagcagtaccatggtcatcatcacctttagtattatctactccacccttatgaattctgccaatctcactactttattgaactttctttgataacctcgccctcaccagttttcctctgtatttcaattatttcagttcctctctgcctctttgctggtgtgcctttattgctcaacccttaagtatagttcttcccatccttggcaatttcctggccatattctattatttcttcttaatgtcatccactaccatgatttcatttaccatccatatattgataaataacaaatatataattccagaacttgtctttctctcttttgatttccagactctagcaacatctgtacttttcattatctcagtggctcaagtcaaatgtcatgttttatgttagacttctccatatcacatctctccatagtatctaatcaaccaatcaccaagtcctagggtttctgtttactgaatacctcaagtctgtttactcaccgtcaccttcattgatgctattctaattcagatcactctttcaggactattccagtgactcatcttttgtactactgtattcagttgactactatatagcaagagagacgtatacataaacaagtttttaatgaagtaaaaaaggtttaaaatgacattcaagaccctaccttattttctctccgtgtatatcctattttcttatctatcctaatttcctctgtatattcacggtgttaatgacactaaacaattcttccagtttatctagtatgcttgctcataggtaaacatttgtattttcattcttcctggaataaaaacattttttcctgaaatagctttcccttaatctttgtctagttaacttctactaatataacccaccttagcttagatatgatgtccttcagaaggccttcttaaattccccaagtttagtttgaataccctctcctatgtgttcctgtagttcactatgcactaattaccatgatattttccctgcagcattgtcaatttctgtattgcttctataatgtgaattccttgtggacataaaccatgactgtctcttttttaattttaatattagctctagggattgacttttttagccaccatatcattggaatcctttaaatattatttgaataaattattaaatatgtatcattaccattaatcttatttcaataattatttcaatattcaattatttcaataattattcattaattgattcaataaatacatattgaaattgtattacatggcagacataattctattaggttggtgcaaaagtaattgtggtttttaccattactttcaatggcaagaactgcaattacttttacacctaggtactgaaaatacaatgaacagaaacagaacagagacaaaaataaacacatacatacatactgcaatgcaaggtaatgtaatgcaataaagaagtagggagcaaaggaggaaggtaagagtgatgcattttatatagggtagtcagagaagacctctctgagtaggtaattttagagaagaaatcaaaatcagagggcaagtgtgtggctatcttagggaaaaacattcaaggaaggaggaagaacaagtgaaagttcctgaagcagagagcagcttgacaagtttaaaagacaaaagaaggccaatgtatattcaatggaggaagcaaggtggggaatggtggcaaatccacttgaagtagcagctaaatgctacgtcatgtatgatcttgcaggtcacgcaagctactttgaattttattatacttgtgagcttcgagttgagagcagaggtgctgcatggatataaggcttacatcactttggcaaggggtaaaaaatagtccacatttatcttttccatttctttacttctcagtttactactcaaccaaccaccctataatgttttttttaaaacccacttagctaaagcaatgctccttaaattcaccagtgacttctaggggccaaatgcaatggagagtcttaatcatacctgcttttattgatttttttgtgcaatagttgtgtgctctggccatgccttcctttttagagctctctctagaaattcttaatgccaagatctgctggttctcttctgatttttgtgatagcttctatgcactctcttatttccattgctcaaatatttatgttattcagtttactgtccttgaacaccttaacttctcattcattatattatctattattattattacttatacagtggtggctcttagacattaatctctagtccagataactccgttacatatcaggcctgagtttctgccttctcactaggtgtttccaaaaggatactgatgaaactcaacacgtctaatattgagcccagcatccatcttttcacacctgattcttctcatatttatgcattttttataatattattcaccatttcctgccattcaagacaacatttttgagctgatgctctactcaaccctctccctctttctgtatctaatttttaactaagttcttttaatctatccctgtaatctattcatcttcatctctgtagccaatgtccttgttcttagcttttccacacctgcttgcctgacctgtcattcaacatgcaaagccaggctcctccttcccttggtccatcctctactgcagccaccgagattatgcagaaagtactaactctatgaatcactgcactgttttcagtacttcagtagctcctatcattagaataaagttcaaacttgtaaaagatctgtggtgatagtccaatttattgaggccatacatgatttagatgctgtgaaaagcttgacataatcatgaatatttcatgtaactatgaaacattttattactacttcacaaggagaaaactacaaaaaggtaaacaatcatcccaaggcctggtagtgagcgaaaatcaggataagatatgaacctttgtctctctatgcatggccctggtagcctcaaacaccctgtaacaccatctttagcccggtccttcttgttttggcacctttccaaacccatcttttcccagtcaacacacccatatcatttttttcttcaattccctacacatacttttcttgtttttattcttctatatttattgctttcttggcaaaaaccacccctgtttttccaaccagtaaacacttgcggatcctttaagacttagtacaaatatcacttcttctgtcaaatctctcctgacttccttctgtagcattaggtacatctttctctgttctcacgtagtacctgtaatgtactattaaggtgtaaatacacacacacattctttatatttttatatttatatatacttattgatatatatatagaacatacttatacatccatataagtacacatatgtataagtttaaataacatataagtgtatagatttactcataaatactttatagaatatacattttagtatatacattatatattctttatatactttatagattttttatatataagtatagggtatacatatatgtgtctgtatatttatatatgtaaacaaatatacaaaaatattagatatttgtacacatatatatactttgtacaacatatatattataggtagtatttatacgtattctttattatacatgtttagaacataaatttatattggcaaaaactgccattaatttttcaccaacctaataattcattttttaagttgattagactggaattctctaaaggcccctggagcctgacagtgtctaagatgtggtaggtaccactatatatatatttttttgcatgaaaaactaaatgggtgaataaataaagtactcacctcttatcctgattctttgtgcctggggttctgttgtcagctctgtgttcaccaacttcagagtgatgagatggacagggagaaggatctggtagaaacaagatgtctatacagagacaatgacagggctgggattatttctcttggaaagtatacttcctcttgggaagaaagctttaggggatttctcctagcaagagagataattatccatgataggagagcaacagtcattttttcatgtctactaagcaatggaggagtccactcagagcagtcagttacatctaattacaacataattaaaatattcaaggcagagtagattcatcttagatcacaggagaaaattcctgaaaagagattttcagtatacaatgagtaattggctctctacctcacctgtgtctaaatattcttttgtttgaatttaatattagttattttttaatgaactacattggtggaggatactgtttcttgtaaataggagaatatgcaaaagacgctgcacctaaacacaaggacttgaaccagattattcatttttgaacccctagagaacatttccacagtggtcaaactcatctgtaaacatgcctgtttttagtaggatagaggaggattttggaaggcgaaggccatatcctggatactggggaagttacaaggtgttgtttggattaaaataagcagattgaggatggggtcttttctatgttaactggaccagcatataaaatgcatttaataatttgttgaataagtgaatgactgtttttctgatgagagtaaggagagggtgtgtataccagatggctcggcaggaaagagtatagagaccagagggcttctgccatcctgacttctagacatgatccagggaggggctggcctggccatgcaggcactcatcaggggagtgaggcagccctgcctcctggccttcctaacagaatactgcagatgagctcgcctcttttccagcaagagaaggtcctgttttctgttctttctctggctctggttctgtgcatagactctgagaatatcagaagagattctgtgagaaccctggtttctaagacttcattttccaagtgaaaaatctaaggcccagactgctgtatatggtggttcacacttataatcctggcaacttggaagaataaggtgggaggattgcttgaatccggtttgagtttacagtgagctatgattacaccactgcactgtagcctgggtaacagagctagacctcatttctaaaaacaacaaacaaagaaacaacaacaaaagaaaacaaagaaaaaaaaatcccattaggcttagtgcagggaatgtggggaatccatttggctaaggacattcaaacatttgggggaaaagccttaattgtaactgagaccatgtctttttgggctcactgcttttgtgatacctatgcattcccattttccctcattttctccctcctctctcccatgtccccctaattacccactcctgaaaccccggcacaagacagtagtgagactcaccagcaggtaataacaaaaatgtgaagccaatgagtaggttccaaaggaagaaagaagagtatagataaggatgacacaagggtcactgagaggcacaaggctgtggctgtcacagaaggatttatcctcctaaagaccatggctccagctgggagaacttaatggtaaacaaagggtccccagggctgggaatcctatgggcaggaaactttctttatctccacccctgtctcctgaagctgaagagccctaactttttagcattcagtccccaggttttggctacacagacatctgctgcaacaaaagtactactgccttatctgtttatttttaatttcataaagaagtcaattcatatcacttatcattttatttactgtcttctgttatccactagtaatggacccgtcgttttccagagaggtcggatgtagtatatgaagaggattatccatgtgatgttcacagtggcttttaaattgcacatctgccttgaagcaccacaatcaccactacttcaagattctctcactcctgcactcattttcctgtctatttttatatttccatttactgcagataattaaattgccctccatctctgccagcctctatatctttggacctagaagtcaatcttgcatattcaatcctaccccaaacaaatgtccaggtcagtgtctcaggctttcccaaagctctctacttcatctttgaatgcactggactttccttcaatgagccctacaacaagtagcctttacaaaacttttttccttcttttctggtagcaaatgccatcaacatttagaaaaaaaaaaatagtcttgtacttcttccccagactatgctacagaacctgagttaatgtgatcaggtcatgtgtacatttctcttttctttcaaaactcacacacaacctctccaccacaaacacacacacactcttggagactggcatgaagcaaggtattacatcctttaaatagggcatggttgattagagttgtgtggggatgagctccaaaacggggcatacagatctaaaaccaggacagagacccatgaagtttatgacatgccattgtgatcagaccacacccagacagaagtggcaccaccttacaccgggtaagtaactggttgttagggccagagtgtaggagagtcagggtgataggacaagatgcagagagcaggatgtcttattaaattgtagttatgaggaaggttctggcttcggtacaataggaaggagctgagcatcttcatttaggcttgtaggagagggcaccactaccagaaaaatttcagaaaatcctgcatttattaagaacatgattttagcctatttcactgggatcctagccaaggacagtataacagcaacaatgctgctattattaccagcaacagcaaatattgctattattcaggggcatctatcacacataagataggaaaacaactatcttagcgcaatgtaagagatggacatggcaattatattaatatttgtgggtagcacctggcccacaggtgagggccagggaaggccccaacctgagctatgaagactaattaagaatcaaccacagatagggctttatagaaaggtatttccaaaaaggaggggtagtgtaagcaagggcatggaggtgaggaaaagttgtttatgtgttttgagaactataagattttccggtgatcaaatataacatttaagagagttaataccttggaataaaacagtagaggtaggcaggggcaagaccctgaatgagtttatatgacatgtcaaacatggtacacattttgatggttgggtttaaaaaggcaggagataacaatcatattttccagagtacattgttaacaatatgcaggaaggatttaaagtctgcactggaaacagatgttattttggtgtatggagctggatgcagatatgtaattgacagctttttacgtagataaacaatactgtttagtggataacctaccatttagagatctctaatatttgcttacttttttaaactaacatctgtataatagctttatattctatttctctgaattatataattgaaggaccagtttccaagcaatagatttatttgaaaaccaaatgaaagaactcagcatttttgattctttattgctctaaatgacctttagatttgttttatcatatcacaaaatagtcctctttgaagtgtgactgaaattacattaaacattctcatcaattttcattgacgtgcattaagtgcgtcctgtgagaaactctgatcaagaacttgaagatagacagattaacatgtcatggtcttgcctttatgaagctcacattgagtaaagatgttagattgttcaacgaagtttccaaaatagggtcactagcccaggctaggaaggcagaggtagtttctgaagcctggaggccaagaggaggatgatggggacaatgaaggagcaagtcctcggacctatctctatcactgtgggtaatcatgcgaatattaggtgaagtgaatgtgggtgcatgatggttggggaaggtgaagtatcaacacattagtgtgaggcattcaggccttaacctttaaggtattagaattcattattaaagaatctaaatccattactaaaagtgaaaagtgtcactgtaacagtgtacctatttgttaatgtgcaaatggttttcattgcatgtaatattgtttgtgtgtgtgtgagagagagagagagaaacagcgagcgagcgacagagagagagaggtggggtgggggtatggtggggtggaaagcctggctttcaaggggccagtataagttttatttaaggaacctctatccagaattgatacctagccagcccactgagccaggcttggtgaagtaggagattccttcaggagaactgaatccccaaggtctgtacacatgctgtggttttccaatgtagccaccagggggagcattcagcccaaggataggcttaaattctgaccagcaccaaggccctactatccccagggcacaagaaaatgtggcttttcttccagcaccaccttcccgtgtcctcaatacccactacacagctgaaagctgccaaccagttcattcttcctttgaggatgatcttcctctctctcatgcacaaaatagacatatctacatcttacaaacacataaaaactaaaattgatggagagagataggttttcttagctttttcagatttttacagatggtaatctcacacaaatctatgtgtgtggcctttagtcttaatcatattgaccaagccttaaatccccactctgaccagaaacagacctaaataaaatccttactcacagggttctcaatgtctccagactcacaacagactctttttaggtgtctctgtcacagaaaatggccacaaggtcacctcactctcaggcctgttagaacaagtccttcccagaagaactccattttgtggtgtgagatcgatgcgggtctttcagactggagagacccacagaagttaggattgccaaaagggtcttctggactggtccacagcccctaagaaattttcatgttgcaattcattttgtccatccccctgcctccctggacacctgcatctgtgtgtgcacagagagtctggaaggtttacagagaagtctccacatcttcccacagcaactctttcagaaacgccttctttcgtaacatcctacctctcttcagtcattatgaaagggaaccgattttcattttcattgtgaaaacttttcagagagaccccttttgggaaaccatctcttctccccactccaagttgggctaaagttttagtgtattttgcatattttgatttgctataacagagtacctgagtctgggtagcttattttttttttttaaagttttgtttggttcatgattctggtgacttaaaagtccaagatcgggcggttgcatctgataaaggtctcatgctggttccaaacatggcagaaagcagacaaagagcaagtgcatgcaaggagatcacatgatgagagaggacgccagggagagaaacccagaaagccagactcatgggaaagtatcaagctgtccaccatatgtgaaattagaattctaaaaggaaacaaaaaatggattaaacgttttttgaggaattattgactgaatgtttcaacatctggacataaaatctattaattcatatctttagctaaccttgagcaatgtcaattaaaaaataaaacacaactaaatgcatatcttacaaatggcataaacaacaaatgtatgccaatcttaaaagcagacatagaaaaagacacattgcatacaagaaaattattagaggaaacaacggaaacctgaaaaaataaactggaactttattttttatttttttatttattttatttattattattattatactttaagatttagggtacatgtgcataatgtgccggttagttacatatgtatacatgtgccatgttggtgtgctgcacccattaactcgtaatttagcattaggtatatctcctaatgccatccctccctgcacccccaccccacaacagtccccagagtgtgatgttccccttcctgtgtccatgtgttctcattgttcagttcccatctatgagtgagaatatgtggtgtttggttttttgtccttgcgatagtttactgagaatgatgatttccaatttcatccatgtccctacaaaggacatgaactcatcatttttatggctgcatagtattccatggtgtatatgtgccacattttcttaatccagtctatcattgttggacatttgggttggttccaagtctttgctattgtgaatagtaccgcaataaacatacgtgtgcatgtgtctttatagcagcatgatttatattcctttgggtatatacccagtaatgggatggctgggtcaaatggtatttctagttctagatccctgaggaatcgccacactgacttccacaatggttgaactagtttacagtcccaccaagagtgtaaaagtgttcctatttctccacatcctctccagcacctgttgtttcctgactttttaatgattgccattctaactggtatgagatggtatctcattgtggttttgatttgcatttctctgatggccagtgatgatgagcattttttcatgtgtcttttggttgcataaatgttttcttttgagaagtgtctgttcatatcctttgcccacttgttgatggggctgtttgtttttttcttgtaaatttgtttgagttcattatagattctggatattagccctttgtcagatgagtaggttgtgaaaattttctcccattgtgtaggttgcctgttcactctgatggtagtttctttagctgtgcagaagctctttagtttcattagatcccattagtgaattttggcttttgttgccatcgcttttggtgttttagacatgaagtccttgcccatgcctatgtcctgaatggtaatgcctgcgttttcttctagggtttttatggttttaggtctaatgtttaagtctttaatccatcttgaattaatttttgtataaggtgtaaggaagggatccagtttcagcattctacatatggctagccagttctcccagcaccatttattaaatagggaatcctttccccatttcttgtttttctcaggtttttcaaagatcagatagttgtagatatgcgtcgttatttctgagggctctgttctgttccattgatctatatctgtgttttggtaccagtaacatgctgttttggttactgtagccttgtagtatagtttgaagtgaggtagcctgatgcctccagctttgttcttttggcttaggattgacttggcaatgcaggctcttttttggttccatatgaactttaaagtcgtttttccaattctgtgaagaaaatcattggtagcttgatggggatggcattgaatctataaattaccttgggcattatggccattttgatgatattgattcttcctacccataagcatggaatgttcttccatttgtttgtatcttcttttatttcattgagcagtggtttgtagttctccttgaagaggtccttcacatcccttgtaagttggattcctaggtattttattctctttgaagcaattgtgaatgggagttccctcatgatttggctctctgtttgtctgttattggtgtataagaatgcttgtgatttttgcacattggttttgtatcctgaggctttgctgaagttgcttatcagcttaaggagattttgggctgagacaagggggttttctagatatacaatcatgtcgtctgcaaacagggacaatttgacttcctcttttcttaattgaatacccttttttcctgtcttctgcctaattgccctggccagaacttccaacactatgttgaataggagtagtgagagagggcatccctgtcttgtgccagtttacaaagggaatgcttccagtttttgcccattcagtatgatattggctgtgggtttgtcatagatagctcttattattttgagatatgtcccatcaatacctaatttattgaaagtttttagcatgaagggttgttgaattttgtcaaaggccttttctgcatctattgagataatcatgtggtttttgtctttggttctgtttatatgctggattacatttattgatttgcatatattgaaccagccttgcatcccagggatgaagtccacttgatcatcgtggataagctttttgatgtgctgctggattcggtttgccagtattttattgaggatttttgcatcgatgttcatcagggatattcatctaaaattctcttttttggttgtgtctctttctggctttggtattaggatgatgctggcctcataaaatgagttagggaggattccttctttttctgttgattggaatagtttcagaaggaatggtaccaattcctccttgtacctctgttagaatttggctgtgaatccatctggtcctggactctttttggttggtaagctattgattattgccacaatttcagatcctgttattggtctattcagagattcaacttcttcctggtttagtcttgggatagtgtatgtgtccaggaatttatccatttcttctagattttctagtttatttgcgtagaggtgtttgtagtattctctgatggcagtttgtatttctgtgggatcggtggtgatatcccctttatcatttttttattgtgtctatttgattcttctctcttttcttattagtcttgctagcggtctatcagttttgttgatcctttcaaaaaaccagctcccagattcattaattttttgaagggttttttgtgtctctgtttccttcagttctgctctgattttagttatttcttgacttctgctagcttttgaatgtgtttgctcttgcttatctagttcttttaattgtgatgttagggtgtcaattttggatctttcttgctttctcttgtgggcgtttagtgctataaatttccccctacacactgattcgaatgtgtcccagagattctggtatgttgtgtctttgttctcattggtttcaaagaacatctttatttctgccttcatttcgttatgtacccagtagtcattcaggagcaggttgttcagtttccatgtagttgagtggttttgagtgagtttcttaatcctgagttctagtttgattgcactgtggtctgagagacagtttgttataatttctgttcttttatatttgctgaggagagctttacttccaagtatgtggtcaattttggaataggtgttgtgtggtgctgaaaaaaaatgtatattctgttgatttggggtggagagttctgtagatgtctattaggtctgcttggtgcagagctgtgttcaattcctggatatccttgttaactttctgtctcgttgatctgtctaatgttgacagtggggtattaaagtctcccattattaaagtgtgggagtctaagtctctttgtaggtctctaaggacttgctttatgaatctgggtgctcctgtattgggtgcatatatatttaggatagttagctcttcttgttgaattgatccctttaccattatgtaatggccttctttgtctcttttgatctttgttggtttaaagcctgttttatcagagactaggattgcaacccctgcctttttttgttttccatttgcttggtagatcttcctccatccttttattttgagcctatgtgtgtgtgtgcacatgagatgggtttcctgaatacactctttatccaatttgccagtctgtgtctttcaattggagcacttagtccatttacatttaaagttaatattgtatgtgtgaatttgatcctgtcattatgatagctggttattttgctcgttagttgatgcagtttcttcctagtcttgatggtcttcacattttggcctgattttgcagtggctggtaccggttgtgcctttccatgtttagtgcttccttcaggagctcttttaggtcaggcctggtgatgacaaaatctctcagcatttgcttgtctgtaaagtattttatttctccttcacttatgaagcttagtttggctggatattaaattctgtgttgaaaattctttcctttaaggatgttgaatattggcccccactctcttctggcttgtagagtttctgccaagagagctgctgttagtctgatgggcttccctttgtgggtaacccgacctttctctctggctgcccttaacattttttccttcatttcaactttggtgaatctgacaattatgtgtcttggagttgctcttctcgaggagtatgtttgtggcgttctctgtatttcctgaatctgaatgttggcctgccttgctagattggggaagttctcctggataatatcctgcagagtgttttccaacttggttcgattctccccgtcactttcaggtacaccaatcagacctagatttgatcttttcacatagtcccatatttcttggaggctttgttcatttctttttattcttttttctctaaacttcccttctcgcttcatttcatttatttcatcttccatcactgataccctttcttccagttgatcgcatcagctcctgaggcttctccattcttcacgtcattctcgagccttggctttcagctccatcagctcctttaagcacttctctgtattggttattctagttatacattcatctaaattttttttcaaagtttttatcttctttgcctttggtttgaatttcctcctgtagctcggagtagtttcatcgtctgaagtcttcttctctcagctcgtcaaagtcattctccatccagctttgttccgttgctggtgaggaactgctttcctttggaggaggaaaggtgctctgctttttagagtttccagtttttctgctctgttttttccccaactttgtggttgtatctacttttggtctttgatgatagtgatgtaccgatgggtttttggtgtggatgtcctttctgtttgttagttttccttctaacagacaggaccctcagctgcaggtctgttggagtttgctagaggtccactccagaccctgtttgcctgggtatcagcagcggtgtctgcagaaccgcagattttcgtgatccgcgaatgctgctgtctgatcgttcctctggaagttttgtctcagaggagtacctggccgtgtgaggtgtcagtctgcccttacttgggggtgcctcccagttaggctgctcgggggtcaggggtcagggacccacttgaggaggcagtctgcccgttctcagatctccagctgtgtgctgggagaaccactgctctcctcaaagctgtcagacagggacatttaagtctgcagaggttactgctgtctttttgtttgtctgtgccctgcccccaaaggtggagcctacagaggcaggcaggcctccttgagctgtggtggggtccacccagtttgagcttcctggctgctttgtttacctaagcaagcctgggcaatggcggctgcccctcccccagcctcgctgccaccttgcagtttgatctcagactgctgtgctagcaatcagggagactccgtgggcgtaggaccctcggagccatgtgcaggatataatctcctggtgcgccatttcctaagcctgtcagaaaagcacagtattcgggtgggagtggcccaattttccaggtgccgtatgtcacccctttccttgaccaggaaagggaactccatgaccccttgtgcttcccaagtgaggcaatgcctcaccctgcttcggctggtgcatggtgtgctgcacccactgacctgtgcccactgtctggcactccctagcgagatgaaccccatacctcagatggaaatgcagaaatcacccgtcttctgtgttgttcacgctgggagctgtagaccagagctgttcctatttggccatcttggctcaaaaactggaactttatttgtgaaagaaaaaatcgatcaatatagacttccagtgaaaattttcttcaaatcaagacaatatctaaaaaattgccgagactgatatcaagcagctatctctatacatgttcttccaggagttttgtgatttcaggtcttacatttatgtctttaatctattttgagttgacttatggcttaaggtaaaggtccaattttattcttttgcatttggatatccagttttcccaacactatttgttgaggagactatccttcccctattgtgttggtggccttgttgagaattactggactgtatatacgtaaatttatttctgggctctttattctgttcaatttggtctatgtgtctatttatgtgatagtaccatacttttttggttactatagctttgtaatataatttgaaatcagaacgtgtgctgccatcaagttggtttttctttctcaagattgttttggccatttgggggtgttctgtggtttcatacaaattttcaaattgttttctgtaaaatgtgccagagctcaggtaacaaaagcaaaaataaacaagtggagcaacatcaaactaaatattttctgcacagcaaagaaaacaatcatcaaaaggaacagtttgggagaaaatatttacagatcatatatctgatacaagtctaatacccaaaatatataaggaactcaatcaactaaatatgaaaaaatataatagtaacctaagtaaaaatgggcaaaggatctgaatatacatttctctgaagacatgcaaatggtcagcaggcatatgaaaaggtgcactacatcaccaatcatcaggaaaatgcaaatcaaaaccacaagtatcactcacacctgttgagatggctattatcaaaaaagacaagagataggggttggagaggctgtggagaaaggagaactcttgtgcatagctggtgggaatgtaagttaacatagccattatagaaaacgtatggaagtttctcaaacaactaaaaatagagttattgtatgatgaagaaatttctctgctgtatatgtatccaaaataaataaaatccgcattttctagagctatctgcactctcatgttaattgcagcattattcacaatagccaagacatggaaacaatctaagtggtatctatatatagatgaacagataaagacattgtgacaggtctgtatatgatattgtgatatatgtcatatgtatgtatgatatcacaatattattcagccttaaaaaaggagatggggggaatgtataaacctagagtacattttgctaagtgaaataaaccagacacagaaacaaataaaggcatgatattacttatatgtggaatctcaaaagaaaaataaggtcaaatgcatagaaacagtgtaaaaaggggaagaaagaaagagaaaatagggagaagtaggtcaaaggttataaacttgcagctgtataggataaataagtttagagatctagtgtatggcatgaagacttaatactgtactgtaaactaaacatttgttatgacagtagatgttagatgcccttacacaaagaaaaagcaaaaggtatctatggaaggtgttgtattgatggataggttaatttgcttgattgaagtaatcatctcactatgtacacatatatcctatattttttgaacaagcttacttgtttcagataaaatattttaaaagcttttatctgaagcaagtcaaatttctgtttcctaattgtttagggtccttcatgttatttccactcttaaaacttatgtaaccctttggatataatgagatatatgtttttctctatttttaatatcagtactctttagatacagctatcactgtctctcagggtacctctgcctctggtcattttgttcattctttatgttgaaattttatatctccggcctacaactcagggttttacagtttcatcaatgtctctattaaatgtttatgagccacagagaatgagaattatatgttcaatttttttgaacttctgtgtttgagttttaaaaaaattaacctaatgtgaaagaccctagatccggggaaaggtgctgtgtggcttagagtataaacatcagaatgtgctatggactttctagaatatttcagtgcccttgtatatcctcagaatgtgtggagagtaattccaaaacaaagcccttacttcaatatccatggtggtccatagctagggctagcagaaggaagggttcaaaatcactatttttatcactcaaattatctgctcttggaaaaaccagtccctttgggtagccccaatcatgtgtaagtctttttcctgaagtatgatcatatggttctcttccttctgtctgctcattgaaccagagctccaggaccaataccactatggcaatacttcttttgcctctacaactctcaggtcacagctgaaatattacctcctctcagaacccgcatttgtcacactagcttacataaattttgttattctctattgcatcaaattttttctttctttcatagcagctatatgaggttgtaattatttttgtcacttttttattatttcctttccgttaaaatacaagcttcataggaacagagaatatatgcaccaatgtatttttgtacccagtagttgctaaaatagagaagcctctcattagataaacaaacaactaaacaatgaccgcttgttaaataaatgtatttagttattctattattcatttctaaacacagaaagagtgagaaagggagaaagacagaaagtaagaatgaaagaaagagagtgagataaagaatagatattttctggcattaaattattgccctcaaattggacagagacataccaacaaatgatcctctgaagatttgaatttaattttccctgtaaattgctctgacctgacaacccagctattttagtttagtctttgcagatgatatacataaaatgcctatctcactttgctgtagcatttccaatcctggacagtcagcataaaagatactatcgtcacttatttaatatttcatagcattaaacattcaaaccttcaactttaggatttactataaaagactgtgactgttaatgataataataaatacattgatgattatgagcattatttttaaattacaacttggtagcctctagcatttatatacctgtattttctatatgcatttctatagaagcagcttgcacatgctgtacaaaccataagatggcaggagaggtttgtggaacactgactctcctggggccatgcagagggaggtttgaagatcttgttgatacagattgacacagaataccaaagcctctttccccactgcctttccttgagtaaaaatcctgagaaaatgtcttccctttctttctatgttgatagcaaaaccaatgaggtcatcacttttaacaactgttgacttattttggattttagtctacattcactgtaacacaaaaatgcagacaagcagcactgattttagtgtggcatcatggaaataacagtgctacacatagcccttgctaccagccaataggactatttatttgagtatgttcatatatgtatatataaatgtgtagaaaagttgcagagaaatgtatggcagattataaagggaaattatctccagggaggatagaaaggtaaggataaaaggtctttactttatatttaatatacatggagtatatataattttttaaattatatcatagacatatttaggatagtgaatggaaaattttaaaaatacaactacttactagttgtatacttttttaaatgtctcaaattatcagattttattttttatccagaaaaaatatataaaaagtctgtttcatagagttttactgaggtataatagatgtaattctcctaaaagtgttatattttgcaaatagtggctgctaaaatattattgttaatagtattccactaactagtaataataactttaattaatatttgttaagccgtgactttgtttctactaccccacacacatgggcatacatatcttcttctatcatgttggcctcattcagtacagtactagaaaatcagtagggactcaggttatatgtgtgaatggatgaataaatgaatgaatgcctatttttaaagacttcatcctttctgtatgtctaaccttagattctagtcatggccatatgtctctaggtggcccaaccaccctatcacagattctgcttcaaaggcactcatcttggtgaatgaatatctagtcccagaaggaggctaaaaactatcttgtccacatctagttggctgacacacaatttaggcttcttgggtgtaatcagatctgtaagcatgatccggaaagaaaaagttcctgaacagaggcttccaacatcctcagaaggaaacctctcttaatccacataagaatggtgtaaattccaacatcttgctcctaagaacactttgccctgggggaaaaaaagaaaagccatcgtaagctttcagaaggcctatgctgaggttttgcttccttcagttttaaagcataatattttgagtaactcaatgtttagaaacctcaaattttgctcttgacagataaaactgaaacctctactatgctctgctttctcacaggatgcatgtgagaataaaacacaaagtctttatgttagaatatcttgtgtaacttcaagtattacgattgtgagagagctttttaaaggtttttattttctttgtcagagctagacagagtatcttctcagcccaaaggtcaaattgtctcattttcacaaaattttcaatgatgattatagtaataatagcaatgatttctataatacttacaatggaccaggcactattgaacacgttagacatattaatgtatttaatcattaaaataattcaaccatgtgggtactattggtatccccacttaaagatgagtggaccaaaacacagaaagataaattgctttgctatagggtacgcagccaataagtggaaggtgggattgtaaaccaaactgtttaattcccaaaactactgcataagactgtatgaagaagcatgaaacaataggtttcaagaagcctacagaacacttaacaggatttttcatgctggttcatagttaagttattggttgaagatgcaacaaatctgaatggcagaggaaaaaacaaagaaagagagttctgagtgagcctgggtctccataggagcaaagaaccaagtgaagcttgggttagttgtggggtgtaagatataattagaagagaagtagctctactctggtagaagtgaaactttgaagaatgtctgattcctcacaaactgctgagtaaggataggaaaatgcatagccttggtcaagatttaagcatgaggacataaaaatagatataggcagaaagcacaagtgaaaaaaaatacatttttgaatgcatatattgtgcaagtgcctctattctgggtgctagcataccagaaacaacatttttgttccttttgtcagaggcatttgaaccagagcaactccatcttaaataggagctgggtacaataaggctgagacctactgggctgtattcccagaaagttaggcattctcagtcacaggatgagataagaggttggcacaagatacaggtcataaagaccttgctgaaaaaacagtttgcagtaaagaagctggctgaaacccaccaaaccaagattgtgatgagagtgacctctggtagtcctcactgctactctcccaccagcactatgactgtttagaaatgccatggcaacatcaggaagttacgctaagcggtctgaaaaggggaggcatgaataatccaccccttgtttagcatatcatcaataaataaccataaaaatgggcaaccagcagtcctcaggactgttctgcctatagggtagccattattttactcctttactttcttaattaacttgctttcacttttctgtatggatttgccccaaattctttcttgggcacgaaatccaagaaccctctcttagggtctggattgtgactcctttctggcaatgcttttaacttcaaaaatctcctttcaaaatgattttattccagttcacaatgaaataactaaaactctgtgtcactaagtggctttgcaaggtggcatgtgtatgtgtggcagagcttctcttccttcagaaccacattcctgagacttgagagaatgtctttggtctctgctgctagagaattttatcctggttcatggactgcagcgggaggtggaagcattttcaaactttgggaggggaatgttaggagaccattaggcatgtgctcaagagatgacaccaagtccaggcagggactaaaactttgtgcctgttgtctcatgaatcagatagcacccctgcctaaaccttcccagtcctgcattgcacagagacccgtgcttgggattggaattagtcatcaatacaaacttattttcccaaattttaatttttattctaaagactttgaatctcaagtgaataccctgatttccttccttccttctttcctttcctttcctcctcctctactttttcttctccttctccttcttcttcttcttctcttccttcctttccttcccttccttcctccctccctacctctctctctttctctatttctttctcatcttgcttttgccttccaggctgctggagtgcaatggcgcgatctcggctcactgcaacctccgcctcccaggttcaagcgattctcctacctcagcctcctgtgtagctgcaattacaggcatctgccaccaggccctgctaatttttttgtatttttattagagacagggtttcaccatgttggtcaggctggtctcgaactcttgccctcaggtgatcctcctgcctcagccacccaaagtgctgggattacaggcatgagtctgtaatgtagccttttctttaacaggctacccacagaggaaccttcccttgagctccttttcagattcttccttctgtttctctggccctttctcctttgtcttctatactttcctactgattttccttcctgtttccctcatccttaacttcctacttaaggcttgctctatcctcttcacatactgtttcttattttgcccactgggttcacctctaagtcacacacaactggacaagtaagcatacccctcagcaactcttccattaacagcccccaaacatgctgattacctggctgctccatagggtggttggttggtcttaagtctcccactagccagcacctagcagttcttcagtttgtgtggttctcagtgctggtgatcatgctgagcctgcccccttcatgcctctctggtcagtcagacccttcagaacccaagaggtaagcagagttcctctaagaatggttagcaacttaaacttcatcctgtcatcaagccagcacatactaagcatctataatgtgctagacaatgtgggtaatggaggtgatgcctggattataatatctgccctcaaaagcttatatctattttttaaataattacaggacaatttaaatgtatcagtttgggttgaataaaatcagggatgtttctcattagggcctcaacacatttggaggtgtgttaagacagtagtcagattcacaccaagagccctgtcatggcaaaccgatgtcatgtgcatctcgataatgtttttgtgtatcaatatgctttgtgaaaaaacttcgaggtagtacagccatatcctatcctgtgcatagacaggaaaatggttgctgactggcagaccagaattgggttaccttttcatctaaatgcatctctccacagcgatttctacagtatgcttgatcttgtctctcatcccatatttggttacttgttgccatgccgggaccagccatgcattggtttgcctttggcatcagtgtatgctctatacccatgttttccacagctggcaaacaccagtggtattctaataacactgttctcaccaccagcccttctggttcactagatgtttccatggagtcctgatataatagacaacttattttaaacacagttgccagccctacactctaaatgtctacagaactcaccagacaaagaagaaaagttatttagcagttgtgataagctaccacttgaattcaaggttattacaagcatgattattgacacatttggttttattgagtgtcccttatttgcccaagattcattgctgtgacaagaatgacaagaagaagcagttacttgagaaatccccttgtagccttctgttacttcatttttttccctctctctctgcttctccttgtgtatccaccatagaagctacaatgattaaaaattatttactaaaatcatttaataaaactatattaaatggaaattcaccaatagaaacttaggaaaggtaacaaagtcctgtgaggttggcttcagcatatccagaacacatgctcaggaaggaagagggtggggggaccctgtaaacaagggactttgatcattcactttgaagagtcttctgtcatatgctggatgggcaaacagcttagagggctgccttagagtgcacaaaatcagagatattcagagatgcacatgaggatggagtgagaagaggaagagagagacacataaatacctctcacgcttagtttattttttcatttaatacagaatattttttaagctcctactctcttcaaagcactgtgcttaaagctggcatgtagttgaatttatagtccagcaaggagactgaccattgagaattacaaatatggcaggaatttctaaacagaaagatgtgcagctctcatatcctgtcacagaaatgacacatcacatagctcctaaactgcatcatagccttaccatgacctcctgtttctgcatttggcttgcctccatatcaccccaaattccaatggttttgtgaagtcaagattggtggtcaaggtcgagggaaagtgcacagatcaaaagctcatctaactatgtcaaactttgtcatagctagatgagctttttgaacttaaagtttgtcaaaatttaggaaaatattttgcccttaggtggtcgcttgttgaaccctgaaaattttactctttctttagtgttgagatacctcttcctttattgaatctataatcgaccttattgcaaccatggagaatgagatagtacctggctcagaggtccacatcacataatatgtgggtgaatctatcactacactgttgtgaagccctgttctccagcccaggcattcttccattcctaacacaagcttctcctcctttacagaaatgggtctgagttgcctatttttatacctgccatgtcatgctgagtgggggctggggtttgcaaagagagaagacagctagggaacataattgctatggtaattgctttctattgtacactaaatatagtctggatgtattgcatatggtccctagtttttaatagaatcctcatgaaaatgctactttcccgctttccaataacagaatgatggaaagaccttcacaagtccaaacacaagcaaatggccaaatggcagagttgttctttttctgtgtcacataagattccagacaatataatcttagtagtatctatgagaaaaatctacctcaatatatcttctttctgcattcacactcaaaaacttggtatctgtgcttggtttaataaaagtagtgagtgtacctcatggagctgagtggtggtgatgtgtgtttatgattgtgtgtgtggcgcttttgtgtgagagagagagtgtgtgtgtatgtgtgtcaagaggttaagggcttaaaggaacaattaattggtgattaggatcatgtactcaacaccatagcttgaagtaaaaaaaaacaaaaaccaaaaaaaactgtaattccaatactgctgcatcatgacttgaaaaacgatgtctgtccactcaccggtgtgtgtgtgtgtgtgtgtgtgtgtgtgtgtgtgtgtgtgtgtgtgtgaggggttgggttcgttgtggggaaacacttgagatcctgtattgatgaaaaatgatttctccagactaatcattctgttcgtaaaactttgagttttgaagacactcagggtctctttcttcccttaagctttctctcatggaggaatgccactcagacatctacttagcacattttacaacacttgcatttccttgggctccttttccttgttttcaaccttcatgccccaatccctgcctaacttctattatttcttttttttttttaatgccatacatctgcatttattataagcaacaggcgggacacttccagcaatagaaagaaaacttaatttacaaaagcagggattcagtgaagccacctggttgttactcttgggcactcacatgtagatgccaacccagagcatcaggaagaggacttcaaagcccatgaagagtgaggccaccaaggagatactctttatagatatcacaagtgtacttggtagaggtgacctcgtaaacaaagaaccaggtggtgaagaacatgtcgatggccaaaagctctacaatcagatgggggaagacagctgggttgaccgggctgttgtatctgctcatggccttgagctccattttgccccagcaggctaagccaccactctgccaccagaagacttctgttatttcttatcttttgctttcctgacttcatctctgctctctgactaggtaattatatctaacaatgttatctattctgattcatagtatccagtagacctgatttaatcatcacattctcattataaggctcaacaactaatgttcacaattttccaaagccatagactgatcatctgatctacaaatacactaaattcctgaccatcttcgtagttgattatggctctgaatggctttttgcccaaagcatccagcaccattttcatctgggtagtttcccctgctggtaaaaatagtaaacacttttccttatctactcccatcccccgacagaaacacgggatccactatcactctctatctgggtgtggttgagatcttcaaaatctgcagtgctgatagctcagcatggaatgaagtgaaccaacaagctctctctgactttggtttataaggatttgcatacattttctgatggatactaggctcatttctgggaatatgcagcaatttaaagcattgtgcctcatgtcaaagtttgctttactcaatctgacactaatctatttggtaagtttttctttctgttagtctatacccttgtcattacagtgtcccctatcctcactctaacttcatcttttttgggagtaagtacttggtagaacacatagaggcaaagaggaagctggtttatgcagcccgaagagagcaacaaaggaaatagataatccaaaccagagtctggaactacaccagagatatcattctgtattcccgtggattttcaacttgattttttcctaactagatcactctgctagggaatgaaaaaggagatctaggattttccctcttctaggaatttgcaaaagagattattcagaagccaagttctaaagattttagggagtctttgggatgatagattcttataccccatcacatcttgactgatacattactgcatttccctctctgcaatctctgataagccaaccgtctactgctcattcctatgcggagcctctaggccaagacacactggagttctttaccgacctgttcataagtctgttcattgttgccacagatgtgactatgaacccctaagcctggtcaagatattggatccaacaccaactttttagactatactcagaagccaagctgcaaagaaaattagtttcagaaactcctccctacggcccactcctctctcctccctccttctttattctcccagcctgagggatttagaactttggaacaggagtcgctaaggtttcttcctgcatctaggttagggaattagccacatctccagaaataagatttattttaagcatcacataggggtagaaaagaaaatgtagggaggatggcctttttgcagcagatttctttctttctttcttttattattatactttaagttttagggtacatttgcacaacgtgcaggtttgttacatatgtatacatgtgccatgttggtgtgctgcacccattaactcgtcacttagcattaggtatatctcctaatgctatccctccccccgacccccaccccactgcaggccctggtgtgtgatgttccccttcctgtgtccatgtgttctcattgttcaattcccacctatgagtgagaacatgcagtgtttggtttttgtccttgcgatagtttgctgagaatgatggtttccagcttcatccatgtccctacaaaggacatgaactcttcattttttatggctgcatagtattccatggtgtatatgtgccacgttttcttaatccagtctatcattgttggacatttgggttggttccaagtctttgctattgtgaatagtgccacaataaacatacatgtgcatgtgtctttatagcagcatgatttataatcctttgagtatgtacccagtaatgggatggctgggtcaaatggtatttctagttctagatccctgaggaatcgccacactgacttccacaatggttgaactagtttacagtctcaccaacagtgtaaaagtgttcctacttcttcacatcctctccagcacctgttgtttcctgactttttaatgatcgccattctaactggtgtgagatggtatctcactgtggttttgatttgtatttctctgatggccagtgatgatgagcattttttcatgtgtctgttgactgcataaatgtcttcttttgagaagtgtctgttcatatcctttgcccactttttgatggggttgtttttttcttgtaaatttgtttgagttcatcatagattctggatattagccctttgtcggatgagtagattgcaaaaattttctcccattctgtatgttgcctgttcactctgatggtagtttcttttgctgtgcagaagctctttagtttaattagatcccatttgtccattttggcttttgttgccattgcttttggtgttttagacatgaagtccttgcccatgcctatgtcctgaatggtattgcctaggttttcttccagagtttttatggttttcagtctaacatttaagtctgtaatccatcttgaattaatttttgtataaggtgtaagaaagggatccagtttcagctttctgcgtatggttagccagttttcccagcaccatttattaaatagggaatcctttccccatttgttttttttgtcaggtttgtcaaagatcagatggttgtagacatgcggcattatttctgaggcctctgttctgttccattggtctatatctctgttttggtaccagtaccatgctgttttggttactgtagccttgtagtatagtttgaagtcaggtagcgtgatgcctccagctttgttcttttggcttaggattggcatgtcaatgtgggctcttttttggttccatatgaactttaaagtagttttttccaattctgtgaagaaagtcattggtagcttgatggggatggcattgaatctataaattaccttgggctgtatggccattttcatgatattgattcttcctacccatgagcatggaatgttcttccatttgtttgtatcttcttttatttcattcagcagtggtttgtagttctccttgaagaggtccttcacctctcttgtaagttggattcctaggtattttattctctttgaagcaattgtgaatgggagttccctcatgatttggctctctgtttgtctgttattggtgtataagaatgcttgtgatttttgcacattgattttgtatcctgagactttgctgaagttgcctatcagtttaaggacattttgggctgagacagtggggttttctagatatacaatcgtgtcatctgcaaacagggacaatttgacttcctcttttcctaattgaatacctttttttccttctcctgcctaattgccctggccagaaattccaacactatgttgaataggagtagtgagagagggcatccctgtcttgtgccagttttcaaagggaatgcttccagtttttgtccattcagtatgatattggctgtgggtttgtcatagatggctcttattattttgagatacgtcccatcaatacctaatttattgagagtttttagcatgaagggttgttgaattttgtcaaaggccttttctgcatctattgagataatcatgtggtttttgtctttggttctgtttatatgctggattacatttattgatttgcatatgttgaaccagccttgcatcccagggatgaagcccacttgatcatggtggataagcttttggatgtgctgctggatttgctttgccagtattttattgaggttttttgcatcgatgtccatcagggatattggtctaaaattctctttttttgttgtgtctctgcccggctttggtatcaggatgatgctggcctcataaaatgagttagggaggattccctcttttactattgattcgaatagtttcagagggaatggtaccagctcctccttgtacctctggtagaatttggctgtgactccatctggtcctggactgtttttggttggtaagctattaattattgcctcaatttcagatcctgttattggtctattcagagattcaacttcttcctggtttagtcttgggagggtgtatgtgtcaaggaatttatccatttcttctagattttctagtttatttgtgtagaggtgtttatagtattctctgatggtggtttgtatttctgtgggatcggtggtgatataccctttatcattttttattgcatctatttgattcttctctcttttcttctttattagtcttgctagcagtctatcaattttgttgatctttttgaaaaaccagcttctggattcattgattttttgaagggtttttttgtgtctctatttccttcagttctgctctgattttagttatttcttgccttctgctagcatttgaatgtgtttgctcttgcttctctagttcttttaattgtgatgttagggtgtcaattttagatctttcctgctttctcttctgggcgtttagtgctataaatttccctctacacactgctttgaatgtgtcccagagattctggtatgttgtgtctttgttctctttggttccaaagaacatttttatttctgccttcattttgttatgaacccagtagtcattcaggagcaatttgttcggtttccatgtagttgagcggttttgagtgagtttcttaatcctgagttctagtttgattgcactgtggtctgagagacagtttgttataatttctgttcttttacatttgctgaggagtgctttacttccaactatgtggtcaattttggaataggtgtggtgtggtgctgaaaagaatgtatattctgttgatttggggtggagagttctgtagatgtctattaggtccgcttggtgcagagctgagttcaattcctggatatccttgttaactttctgtctcgttgatctgtctaatgttgatctgtctaatgttgacagtggggtgttaaagtctcccattgttattgtgtgagagtctaagtctctttgtaggtctctaaggacttgctttatgaacctgggtgttcctgtattgggtgcatatatgtttaggatagttagctcttcttgttgaattgatccctttaccattatgtaatggccttctttgtctcttttgatctttgttggtttaaagcctgttttatcagagatgaggattgcaacccctgcctttttttgttttccattttcttggtagatcttcctccatccctttattttgagcctatgtgtgtgtgtgcacatgagatgggtttcctgaatacagcacactgatgggtcttgactctttatctaatttgcccgtctgtgtctttttactggagcatttagcccatttacattaaggttaatattgttatgtgtgaatttgatcctgtcattatgatgttagctggttattttgctcattagttgatgcagtttcttcctagcctcaatggtctttacaatttggcatgtttttgcagtggctggtaccggttgtgcctttccatatttagtgcttccttcaggagctcttttaggtcaggcctggtgatgacaaaatctctcagcatttgcttgtctgtaaagtattttatttctccttcacttatgaagcttagtttggctggatatgaaattctgtgttgaaaattctttcctttaaggatgttgaatattggcccccactctcttctggcttgtagagtttctgctgagagatctgctgttattctgatgggcttccctttgtgggtaacccgacctttctctctggctacccttaacatttttcccttcatttcaactttggtgaatctgacaattatgtgccttgtagttgctcttctcaaggagtatctttgtggcgttctctgtatttcctgaatttgaatgttgacctgccttgctagattggggaagttctcctggataatatcctgcagagtgttttccaacttggttccattctgcccgtcactttcaggtacaccaatcagatatagatttggtcttttcacatagtcccatatttcttggaggctttgttcatttctttttattcttttttctctaaacttctcttcttgcttcatttcattcatttgatcttccatcactgataccctttcttccagttgatcgaatcagctactgagtcttgtgcattcatcatgtagttctcatgccttggttttcagctccatcaggtcctttaaggacttctctgtattggttattctagttagccattagtctaatttattttcaaggtttttaacttttttgccatgggttcgagcttcctcctttagctcggagtagtttgatcgtctgaagccttcttctctcaacttgtcaaagtcattctctgtccagctttgtaccgttgctggtgaggagctgcattcctttggaggaggagaggcactctgatttttagagtttccagtttttctgctctgtttttccccatctttgtggttttatctacctttggtctttgatgatggtgacgtacagatgggtttttggtgtggatgtcctttctgtttgttagttttccttctaacaggaccctcagcttgcagcagatttttaaaagaacttccaggaccttgtctgtatattgacgcctatgtcactacaggaatcagagcagggcattacattgatcctttaagaaaattttgctaccctataccccttgaccctactcttttttttttttttaatttttaaaggtaattgttagaaatttcccaaggtttatttgaaatgacacaccactgaaaacataacttttacagatgatttgtggatacagtacacatcacctatcttactttaggacagtctgtgaagatgatatttttcctgctgcagttcctttgtcaagtgactttagacagatacaggactgcaagagtgactcaggtcatgctggcataggagaagcaggtgctagtgtttcacttgaactagttgttgggctggggtggaatgaaagctccctaggccatgaggacatctttgcaatgtggagaggacccaaatcagtgggtgttgctctttgaatgttgaaggccttgtcagcatactggtcacccagtttcatcatcacttcatactgtttgtaccaaagcaccacagtttccttatgaaacttagcttcaaggctggagatgtttttgaaagtattaatataaaatccaattcgtcttgactataataatggtaacttttcttgtaagtcaccattaaactcttcaaactttctctatgctttctgaaattctacttctgccttagacagaggctcctatccttcctcctgaagctctgttgagcccgatggaggtgggcaggcactgtcatagtccgtaagcttcctgctgcacttggtgatgtgattcttcaagtcaggaaattggtccaggtagttttccagtgttagcaaggatgcatccatgagttttttgtggatatcctcccagagcacatcacctttctcaccaaccattttcacaccttcctgcccagaccaatccagcgcacagacttcacacagtgactcagcttcgtcaaggtctcttgaatgcctttgattgcttctaaacatcctcagagttctctcaggtctggtaccctctgcttcttgtggcttgaagttctggacatattcttcaaactgtttgtcttttgtctcagcagctttccctggcttctggaggacgttttcctgtgagtggctgagtctcttccaggcattcttggcaaagatgccctcttgatgttggccagggctgcaggtccaggacctgggaggagctgagcgctcagtgtggctggtggcgtggaggggcgggaggaagtggggaggatcatgaggaggggtgaggtcttcgaccctactgttgatatgttgttcagggaccatcgggagcccagagctctgctctgtttcacgggactccacaaagagaactgcaagtcccagtctttcacctctcttggactttttatcttgtctcttcatcacatctcttcagtataaggaagaacagaaagggaggagagaaactcagggttgtcagtcaaatgtgtccatttacagaatttataaaatgtattgttatcctagttatctttatactagcctgctatggcaggtttcaggatcactggacctagagggtgagtcaagaaagattttctttgatgtggcttagatccccctgaattcattcccaaaagcccaagggaagaaagaacaggattaagtatacattgcccatatcttggaagacaatacagagagcagtaacagacagaagaactagcagacacacagaaagacatgggtcactttaaattttatttattcattttaatgaaaaattatattttgttaaaaatggtctatgtgagaagttctgtaatacagtagggaataagaactatgttatatttaccatcctcgagcacacagtcaagaagctacaaaagagaaaggcaaatttcacacacagccaagttgagtaaaacaaacaaaatcttttggtctaatcagataaagatcatttactagcctggaaactattgtgaaggtattattttatttttgttttctctgtgttatttatacatcccaagaatcctaaaaaatccccacctttctgtgatgaagagtaggtgggcagccatagatcactgagtgtcagtatgacagaggccagagatgaggggcatccagctgactggtcactgggtggccccttgtgtagtccaagcacatcataccctgtattttggtcaaaagaatatctttcttttaaaattaatttaaaacttatcatttgagtcatggatactggctcttcacctggccataggaccacaaaccccctcttctcatgcctagactctgaaaagaatcaaaagtatttggagccagaaaaggccattttatcttctagttatgagcattgcctccatcctctcccttcctccccactctccacatatgaccaactgtttgtttttcaactctgctattttgcacatgccagacacccctatctagtcttatctctgatgttcccctaaaccagacctctcataccactttatgaaaatgcatctctctgttcagtagtaactggaattaactatcaagacaatggtcatctgaattagaaattatatctctgttttcaaattattatcaatattatttgataaatgttaaccaaagttttaactgaacacatttctcatagagatactttccctagactcatcattttgaattgagggaaatggtttaccctcattgaagaaagtaattgagggaaatggcttactctcattgaagaaagtctcatttcttcacgtgcaattttctagaaacagcagccagctccatatatgcaagagaactggatgtatgtctgaagccaaaaatgccttattcctatgtataacaggactaatatatgcaagccatatggagagcaatgggcattgactgaaatgccggtgacccaaatcatagacccaagaattatatatataattggttcatatatatatattatttatataatatatataaacacacacagatacatacacacactattatatattaagtatatataatagtgtgtattatatatattaaatatatataatagtgtatgggtatgtatctgtgtgtgtatatgtatgtgtgtaagtatgtatgtatgtgtatggtgccagccataagctaatcaaacaatgtgagttaaattacctgagaaaacaatatcagttgagcactgagatatgtacttagtgttgtacatatatcttatacaaatcagcaatagacaggcagggtaaaataatgttctaagtagcagagggattgactgatttccactgaaatgctcagggattgattagttctcattgaaatgactttccctagttacttatgctggcaacattgtcatcctgtccaggtcccctgaattattcctcagagaccagtgaaacaatgtcatgctctagagtgaggcagagagaataaacgaagtatgccactctgaatctgcttagttttaatgctatagataaatgggttcataaaaggtgggaaaaggaagtggatgtagctcattgtgatgtgaacgacatgaggaacatgctttccaaacctatgaataaatgtcagacaaactacagtgacatagaagaccaggatgcagcagatatgagagacacatgtgttgagggccttggccctttctcctccagaaccaatgcccatgacagtcttgagaatcaaaatgtaggagaaaaagatgatgagaaagtccaacaagaccattgcaaataaaactacaactggatagagacggttgaaggtgatgtcagcacaggctagcttgatgacatcttggtgtagacagaaagcatgggagagtacatgggatcgacagtagggaaaccagtgtaggcgaacaactattggcataatggacagaccagcccttgtcaatacccgcacaccaatcttcattacctgggtgttggtcaggatagaggtatatcttaaggggctgcggatggtaatgaaacagtcataagccatggcaagcaagacacctgactccatgacagaaagagtatggataaaataggcctgagagaagcaggctccatggccaatctccctgtgatctaaccacagaacacctagcactgtgggcattgtggtcaatgtcactccgaggtctgtagctgccaacatagctaagaaatagtacatgggctcatggaggttatgatcattcctgatgagaaagagaagagtgccattgccaagaagtatggagatgtaggctgccaataatgggatgaatatccagtgatgtgccttctccatgcctgggaagccagtaagctggaaggtggaagcagacttattgagccccattgccagctttgcaaagaggcaaatatttactccaggtaaagcaatagtaatcagttgtataaaagttgctccttgagaattctacctgttcataagatgttcaccagtcctgactttcagtgacagcaaggatgataatttagtcattcctgggagatcctaggtatgggaaaatagaatgtataaagaagatattatttagggtttactctatgtaagattattggatactacgttggggatacagctattcatgcagaataaacattgttgaattcattgtaaatcatataacccagaaaataaaaacaaaatgaaagaagaaatcactatatttgaatagtgctgtaatggcctgaaacttataggtcacttttcatggtgctcttcatcctgactggtggtattatagggtggatgtaaaggtttcccaggctatgtgagacctaaaagatcagtagaaaaatggttctaagcactattggaaaagcagatataaagattatatggaaaaacaaatacacaagtaagaaatatatgagcaaatacaataaaatagtaaatttcagagattgacttttcttcaatattcctggagggaaaattcaattgatgaagctccagagacttttgggtagttagaaaatgacgtaagagtgacttacctgtgtgtgtttccaaagcacatagaactctaagttgcccagctttataaccctagttattgatacactgcttcaaagaattcaaattttcataatataaattgaagaataaacagtaaaatgtggatttgatgataagcttttgaaggcactaattgataatagcaccaaactactgttgcatatcacctacttggtgatgcaaaaataaaaattggtaatttaggcaagatcaaggagaattttttttttaaaactatggaatctgatgggatttgacaaaagtgagaaggctctgtgactcattagaattctaagatttcagctggtgcaggcagccaacctctgagaatacataaattgtgtgttggtggcatgagccagagaaaataggcccaccttctcttatggttggtttggactatacatctcatatactattgaaagagcatattgatgtaaatttatgcacgatttacaagacctctttctgtccatgaaaagaatgcatccaagattactggactttcattttcagaagaatttgttgaagtttcagctctgctctttctaacaataatgatcttgggaaagtaatttaatcttgagatttggttacataacctgtaaagactactagtgatttctgtcttctcagtcattctcttgacacaaagtaaggggaaatgttttgtaaagagtggataatttttttatttttgtgtttttgttattgtttcagagaagtacctcctttctctttctctagtgagtacatgtcaggattattcacccagaggtgtgtcaaatgatttcctttttttctgtggaagccttgggaacagatataagatgatgatggggtttttaggagcctgtgtttgactttaaataaagatattaaactatagtttctctaatcagcagataaaatgtgatatgtctgggtgggaaagggaaaggagaaaagattgatgagccaatgtgggaacttctgacatagctaaaagtaacgttgagcctggggcattgggactgagggaagtagaggggaaagcaactctgtcctcaaaaagtgagaaaaggaggtattattgctcaatctgcctgccagtgagaggttcagacaatactcagcttatgcaggattaaagaagcagtatggcaaataaaaattgtacataggtatataacttattgttttattataggtattcattgttaaatgattaccataatcaaactaattaatatatctatcacctcacataataactttaatttttttggtagtaaaaatatgtgaggtctgctttcttagcaaattttaaatatacctaaataaagctgggagggaaaagataatacagaacattaatctagttaattgtgttatattactactaaataaacatataattgataaattaaaaaaaaacaggagtaggaataccagatagggaaaataaagctgagaaacaaatgtatggaacaaataattgttgaatttctaccgtgtgtcaagtattggactggggcattatatacacctcattttttgggaagaatccttaaaatagctgtttgtcttgtctgttttcatattgaaaactgagtgctttcacttgattcactcagttgcttttgtggtatatgagatgatctgtgagtttcagaggggataaaaatctaaaacctttgcctcatccctgcagccattcaccctcttccagggtctctgtcatagaatagacttgagtttttattaatgagaaactaattctcaaagtctcaaactctgccgcataaactgatggctctatgcagacacctcagcaggagcccattcagatgttaactttcatatattctctcaccttccctttggcttttttccttcacttttcctgacactcttttctgtctcaagcacttagtatctccatcctttttttacccccttacctttggctattatcctttctgtgatggttaatattgagtgcaaacttgattggattgaaggatgcaaagtattgttcctgggtgtgctgtaagggtgttgccaaaggagattaacatttgagtcagtagactgggagaggcagacccacccaccctccgtctgggtgggtactatctaatcagctgccagggcggctagaagaaagcaggcaaaagaagatggaagagtagtggatgcctgttacacaatataaacctttccaggtgctaaagtcacacaggctatgtgaatctgtacccctgatccagaggcacacataacccaagctccgtccaagcttaattttgaattggtttattagtcatatggtcagatagtgactttttttctagaaagtatttgaacctctgatgattacagaggtatacctcctcaagaatttggaagagttgattctatatttggcacttatctggacttctaaggtaaaagacatggggttgggggcagggggactctcagggttagaatggaagccagagagattaaagaatcagtcaggtggagagaaattactacaaccccataattcatgcctgagtcaacacccatgctctggtttgttcgtagaattgtttgccttatgtgttccagaatctatccttcacttttttatatttgaagaggtaactctcaaagaaaccaagttttagagatgtcagggagtctttaggacccatgcctactacatatatctactcttagcagacaacactattacttttctcttgctaagaaatcagcttcgatctctctgttttttttttgccttggttcctgcaatgagatcttacagaggagattcattaaataccctcactgacctgaaactttgttcccttccattcttcagttccatagtcatgtatctcacatctttagccgtatgaaagatttgggcatcatcttttcagaatctgcacatgagcctggctggtaggaacatttattttagaagctcctccccagagaccattcctgatttagataattattgttcttccctccctccctcttctgctccctcctctcttccctctctccctacctccttccttccatctttttctctattatttgtgccctcagccttgtgggtattgggctttgaacagcacaactcaagatctctgtctctgtcctggcttttactggaggttttcctctgttggaggttgaatattttgtctacattgtggctttggctcttgctgtgctactttggaattattttatctcattgcatttcatagtccttactgtaaaacgcatataataattgccatcacaaagtgatgtggtgtgcttggctgaagcaccatgtgatgagtatgcctgctgcatcccctggaaaagagaaaacttctggtaggctaaactcaagaagggaatagttagtgataactgcagaatgtgcgttcacgttgggtactagagaaggctgcctgaattttattatattgactctagtctatctagctctctgctttcaagctttctctgatctaaaccaagcaggaaatatagtagaaattcaggttacataggccaagaagatatataggctttctcttgagataaactgggaaagatttgactgttgaagtaaatgtagggaataaattacctcccagaggtgataccagagtctgctggggctatgaagacaggctgtctgattccccacacataaaggtcctaccagtggcttgattcagccagtaacttatttgaaaaaagaaagattatttaaaagcttggggggactaattaagtgttccagctccctctaaggaggagttaatacagagtaaatatttcttaagatccaagttggctataaaagggagacatctgggaaggtgctatctttattaataaccacagtgactgcttctcttcacagatgttgagaaggaacaacatgatctaagtctttaggtaagacacaagaaccctgctcttcctcaccatcaaacaagttatggtacctgggagtatggtgaaatactcctagatatataaagagtgtactaggagactcctctataagctctccagagaaagatacggagaagaagtgaaggatctcaatagtccacagctttggatgtgtgcacagatttcagtctgaagttgatagaacttcaaaagcaattccaagtgctaccaaccaactacctaagaccttctgtactcagtgatgtgaatatgattgaccctctcatatgtcttctttcctttctaaaagatgaacaggaaggcacctcttattctactacattttactttttaaacaaagcagagaaaaattatggctgtaaatgttagaagtttatctgattttctaggtgttccattatagaatcttcttgcttctatcctcagtctttatgatctctttccttccctatattttttttcctcagcttttatctcttctctcattgtctttcttctcagaaaccaagagccacgactagctgaggacacaagaattttcacaaaacaaagtagagtgattccatagatcactattatagctgcattaccaggtatgtctgcatggaattcttgggaatggagaaggaggaaactttaagttgcaggttattattggcaaaatacaatcattgccttacagtttggttagctttccctgtagtgattcatcacttgtgctgcatattctctgataagaaggaatttttcacaaagttgagatacagtgaaagattaggttaaaggagattattgctgaaacgtcagagaagtaagagtgttgacagagaaatgaagtacatagaacacagaaggggaggagctaagctggattatctttgcgtctagtaactgaagaatatacatcactcattgtatgttcagtaggcactgaattctggtttatgtctctcagtcctaggacagaatatggatgctgaaaaatgattctttcaaagtgctgagttgttgcctcacgcccagttgtctggcatctcttcactgaaactattacagttagatctcatctctatgggtggaaggtaagaggatcgtttcctttggtggcatctttagggtagtgccttacactgacaaagtaactctgaaggggtatatttggatacgaccatctttttaacttaggataaaaacaacttcaagaagttgttctggcatgtgacaagaaaaaaaagcaagggatgcatttgctctaattcagctatatttactaatgactcttgatttcctcacaagtgaatatgtatccccctcagacttccattttgagtaaatggcttcaccattctttcatttgttcaaacagaaatctaggggaaacctcatttgatttttccctcactcccatttttaatatatcagcaaatcttggcactacttcaaaaatgcatctgtctctgtttaagtttttctatttttctctttttttcatttcccctgcttctctcctagtcaaggtcaccatgactcttcatatggatttttaaaatagctttctaactcatctcttttcttgtctcttgcttagtcttcttcacatagcagtctaagtgagtaatttaaaaatacaaatcagaatatatcaccacactattttccattgtgattttcaaagtgtcctaatgtctttactacatttatagtaagaagaaaacaaaacaaaacaaaaattccgtggtggtctgtaaggccctatgacacttgattactacctgcttctttgacatcatctattgtccctctcctgttttcttatcaaatgccagtcatgctgattttccctctggaacagttttcctctaggtctgtatacggtcaggttttcttttgtattgaggtctcagttcaaatgggacctcctcataggtgcagttctaggcccctcaaactgctatactatcttgtatacaataccatccaattaatctacatcaagtagtactgttttatgttaaacttgcatttatatttgtttaaaattgtcttatttatttttcaacttaatttatggtttataagattagggactttgtcttattaccatttaattccagagagctttaaatatcatggctgtcacatgatgcgtgttcacaaatattaggtgaactaagaaatgtttatcagtcacatgttagatactttgcaaggtgttgagcaaagcaaataaacaccatgtctatatgcaagaagcccctagtctagtggcagaaggaatattaaaaccttctcaaaggactaatctcttctcttcagtaaaagacagcaccacgtttaagcagggaaatagctctcactcagtattggggagaacagattcagaagcctatggctggggataaagggaaggaaaccaggaagatggatgtttaaatataaatggagaacttgaaatgagagaggtcagattctagggaattacttcagtaggcctatagaaaaataatttaaaaagaaaaagacactacttgtaaataagaaacagtaagatgtttaaactgaaggagatacactattataagtgatgtctttggctggcctaatcatttattccagccccaaagtctaacttataattagactgagctattgtcacaagtagtgagtagtactgaaggattctacaagagggtaattcacactaatcgtgaatgtctgttccccatcactagtccatgaaatctggaggccaagtgtctctttctcaatctgactgctccttagctacagtggtagtggcagagtttctcttcccacacttttctttcttaggctgttgagactttagctgataattcaggtaagtctttacatgcaggaaaatgtggattagggatcactactgtgaaggcaattacaggtttaggtggtagaccagaaaaaaattagtgttagctttctggaaatccccttgaatgccccatagaatacgaattctttaaaatctgcatagttaagggtaacagtttagaagttgtagtttacataattttttttctgaagagaatgcttaaatgcatataaacagttgaaactccaagaatttgattacgtaggtaggagatagatcctggaatgtgcagttaagaatacaaatagtatgagtaaccctgagaatgtattttgagaaacaatcacttatattgatgtcattattatctttaggaaaaaattctgagaatgatatagtcgaagtgataccttgaaggtagaactgtgcactgtggtaataacagaaacagaaagacatttcttctatataaacccaggatgtcgtccagcggcagctcccatcccttcctattgactggttttccaggcttggaggaagctcatcactggatttccgtatttttcttgttcatgtatatatccatcctttttggcaatggcaccctccttcttctcattaaggaagatcacaatcttcatgagcccatgtacttctttctggccatgctggctgccacagacctggggctggccctgaccacaatgcccacggtgctgggagtcctctggctggatcacagggagattggaagtgcggcctgcttttcccaggcctactttatacactcactttcctttctcgagtctggcattctgcttgccatggcctatgaccgttttattgccatctgcaaccctcttagatatacctctgtacttactaatactcgagtagtgaagattgggctgggagttctgatgaggggatttgtatccgttgttcccccaatcaggcccctctatttttttctgtattgtcactcccatgttctttcacatgcattctgccttcaccaggatgtcattaaactcgcctgtgctgataccaccttcaaccgactgtacccagctgtgcttgtagtctttatatttgtgctggattatctgattatcttcatctcctatgtgttgatactcaagactgtcctgagcattgcctccagagaggagagggccaaggctctcattacctgtgtctcccatatctgctgtgtcctggttttttatgtcacagtgattggattgtctctgattcatcgttttggaaagcaggttccacatattgttcacctcattatgagctatgcctattttctgttccctccactaatgaatcctataacatatagtgtcaagaccaagcagattcagaatgccattcttcacctttttactacccatagaattggaacctgatctccaatcatcacagtcactctcacagaatgtaaaaactctaatatttagcaggagagcaaagaagtctcatatctagcatgcatgctcatatgacttggtaaaataggtgttaaaatacagcttcaagtttccctaaggtatctctttaagcccaactctttagctaaatgtagtttgtacaaatttttgttgcattcctgtaaacggaatatttctctaagctttccactaaattattgtgataacaataccttaggcatctattggtatgtctataatgtaactaacatatgtttatttcatggtataaagttagcagataggaacagaatcataaaaatataaaattattagttggttcgagtgaaatggaatagagtttggtttactatgtcaaatctaatttccaactcttatgaatttctctgcaggtgtccatacaaacaatgggaacctataaatttggtcactgaagtccaggaattttcctgcaaaaaagaatataatcttctttgatcagtgacctaattacttatcatctcaacagtctagttggttcctcctccctccatcaaattataatgaatttgtctcaaaaaccataaactcatatttattccccaaggcagtaccttctgacaaacttgtaacaaaaaaatgtgagaagaggaatcacggataaatgagaggacgtagacacagtcagtacctccttctatcttgctctcattcttattctactaccctagttgctagctccaatgttgaggccatcctcagatatctacgctggctgactagtccaaattagtggaagagacagttccttcaccctccttttgctatgaaaaaggtctgaaggaacaaaaaaaaataggtttctgcatttttttgaagaatgattgctttctgtacatacattctgattccatgtaataagtgtaaatttcccaaagaatacaacaatgtcattctcatttgattaaaattgtctgatgagttaggaagggacccataactcaatttaaaatatcctaaaaagagggaggttatgtcttaattatactttaatcagagcaaaaataatacttcagtgagacaagagaggggactatatagaagatattgtttatgtctttggtgttttaccccgatcattttacagaattgtgcacctgtgaatgttggctgctcattgttcatgtttctgctttctgcaggttgttgttctcaactcagcaggaaatgtcttatgaagaaaatggcccctgctccttaggtagcaggccataggcaaatactgaccctcttgccttctgaagctaagctccagcttcagtatgcacttgcttacctccttcccctgtccacactgcttttacttgctccctgtctcctgagagcattcattaataaattgcacacatttgaatccctatctcaggtattgctcatagagagtccaacttaagaaaaactgcaatccttatttatattctgtttcattaagagatgtaattgtgaaagaactgaacatataaaaaaatcagctttatcatgttttttatccttgtcacgccatgtcacctgagcaacacagtctgaatactaaattgtgagtgtgagtgcatatatgtgatggtaggtttttgtcctgttttcaatcattcataaaaccaaacatgtgtcccttaattatgctctactacatccacaacttattttattcataaaaatattgtggggtagatattatcactgttttcttgatggggaaatttaatataaaaaagttaaatattccctccaagggcataacatttttaattggtatagtcatgattcaaatttatatcttctaactataaggccagtgtgaatggtactccactacagtagactatccttagtggcttctactttttgccttgtattccgtcatgcttgtagtacctactttctttttctgaaaatttctcctccttctactccaaaaatattgttccctatgaaaactgatattttgcattgtatctccaaactcctaaccgcagtagaagaacttttttaaaaagaatttttcaatatgacattgcaaaaaaaaaaagagtaatgcttttgttgtagaattactaaaatgcaatgcttagaattgttaatgacaatgtttttcatcaggcaagtgacttcaaactataataaatatttagagtaaattatagataaagaaatgataataaataaaaagaatcttcaaatctctgattccatgttttcctgagactcagtgacaaggaggacagtttgaatcttttttttgattccacagcctaataaactcctcttcttgtaatttgttttgttcagcctagtttcagttgagtttcacttataaccaaaggctattaataattatatcatctcagttatagatatgtgaatcttctctaactaatatttaaaactggaaaatactgttaggtagaagagctgcctctttttctaaaatacaggaaatggaacctaaaaatggcaggaaagttgaccatttggtgaatgatttatgaagttatttcccttgtttaagaagttcatttctgacttgaaagtaagtgtgaaactaaattcactgagaagatgctgtaggatgaatacagacacaggacatcggaggtggggggaagactaaataattatctcaaacttagttatacagaaggctacatggtggaaatccactcagacatgtttttctattcaaaacccattgtaacaatcaacataaacacagtatgttagtattatcataaaatttagaactttctgtgatctcctacaagtcttcctgtggtaaaatgctatgtactattagaagccttagcaaattaatacaggaacagaaaaccaaataccacgtgttctcacttatgagtgggagctaaatgatgagaacacatggacacatggaggggaacatcacacactggggcctattggaggatggagggtgaaaggagggagaggatcaggaaaagtaacaaaagggtactaggcttaatacctgagtgagtgatgacataatctgtacaacaaaccctcgtgacacaagtttaaatatgtaacagacctgctcttgtactcctgaacctaaaataaaagttagttaggaaaagaagcctatttataacactatctcctaggaaacactgcacatgaatttgtattcataagaagagtagaattcagagtggtccagtggactaacaaactggtgaaccaccttcttacagcaggtgaagcctgtaattcagcttttcatcattcaagactgaaagaagaatataacttatatagagaaggacctcatgaggaataaatttcatggtgcctattaagataaataagtaccatgtagttatgggaaatctaaggtgtaaaagaatatacattaaaaaaagcccttgccaaataccatcctttctttttcaaataataatatacttgtgtagtatgggcttgaagggataacataccataagaatatttaatttgagtcaggaaatgaaaggctaagtgtgcatttctgtagactaagccaatcttagaaatgattaagaagacgtggaagaatcttagagacacactgaaaaaatatgtatggtctaatgagtttacagatcacttttcctcccatataaaatgaatttatactagataaggggaagatgaactttattcctctcattaacaaataattgctgggttccttcaccagagatgcagatttttatagggtaaatgaaaggtgatatatttaaagatacttactagattatatgagtattaaattgggcagcaaggatgattagaaatgattaaggacccagaggtctccatgtccaattaaagaatgtaaatctgtttttgattttatagcctaaatccttagacacagtcattgttattaataaactcatagacaaaatttattttatgggaaatttaggagtttatgtccctagatttcaagtacatgccaccaaactgacagatgacagtgattagtcacaaagtgcctcaaaaatagatggccctatgttagtcatggttctccagaaaaatagaatcaacaggatttacccaacttcaaattatactacaaggtgacagtaactaactgaaacagcatggtactgataccaaacagacacactgactaatggaacagaatggagaactcagaagtaagaccgcgcatctgaaacaatctgatcttcaacaaacctggtaaaaacaagtaatggggaagggattccctattttataaattgtgctgggagaactggctagccatatgcagaaaattgaaactggaccccttccttacatcttatacataaattaactcaagatgcattaaagacttaagtgtaaaacccaaaactataaaaactttagaagaaaacctaggcaataccattccggacatagacacaggcaaagatttcatgatgaaaatgtcaaaaacaattgcaacaaaagcaaacactgtcaaatgagatctaattaaactaaagagatcgggcatggtggctcacgcctgtaatcccagcactttgggaggccaaggtgggtggatcacttgaggtggggagtataagagcagcctggccaacatggtgaaactccatctctactaaaaatacaaaaaatgtgctgggtatggtggtgcgtacctgtaatctcagctactcaggaggctgaggcaggagaattgcttgaacccaggaggcagaggttgcagtgagctgagatcgcaccactgcactctagcatgggtgaaagagtgagacttcatctcaaaataaagaaaaatacaattaaatacagagcttctaaacagcaaaataaactatcatcagagcgaacaggcaacctacagaatgggagaaaatttctgcaatctacccatctgacaaaggtctaatatccagaatctatgaggaacttagacatatttacaaaagaaacacacaaacaaccccattaaaaagtgggcaaaggacatgaacagacacttctcaaaagaagacatttatgtggctaagaaacatacgaaaaaagtctcaatgtcactgatcattagagaaatgcaaatcaaaaccacaatgaaataccatctgacaccagtcagaatggtggtttttaaagtcaagaaacaacagatgctagcaaggttgcagagaaataggaacacttttacactgttggtgggactgtaaactaattcaaccattgtggaagacagtgtggcaattcctcaaagatttagaaccagaaataccatttgacctcacaatcccattactgggtatatacctaaaggagtataaatcattctattactaagatacatgcacatgtatgttcattgtagcactattcacaatagcaaagacatagaatcaacccaaatggccatcaatgatagacaatttaaaaaatgtggtacatataaaccatgaaatactatctaaccataaaaagggatgagatcatgccctttgctgggacatggatggagccgaaagccattatcttcagtaaactaatgcaggaacagaaaaccaaacaccacatgttctcacttagaagtgggagctgaacaatgagaatgagaacacatggaaacagtgaggggaagaacacacactggagcctgtcagggcatggggtgtggtgaaggggagcattagaaaaaatagctaatgcatgctgggcttaacacctaggtgatgggttgataggtacagcaaaccaccattgcacacatttacgtatgtaataaacctgcacatcctgcacatgtacctcagaacttaaaaattaaaaaaattgaatgtacataaaaatatggaaattaataaatgtaattcactgcattaaaaaaaaataatggcaaaaactgcaattactgttgcaccaacctaatataaggaaatagcagatgtgattatggaggaaggcaagtcccaagatatgcagagtgagtcatcaagttgaaaactcaagagagcctggtagtttagtcccagtccaagtctgaaggcctgggaaacaggaggattgatggtgtacttgcaacccaaaagccatcaggcttcagacccaggaagttttgatgtttcagttcaatctaaaggcagaaaaaaaggtctagattccagtttgaaggccatcaataaggaataattctctctgatttggggaagggtcagactttttgttctattcaggttttcaactgattggaggaagccgcctgcaataggaaggaccatctgctctacttggtctaccgatttaaatgttaatcttgcctaaaaacaccctcacaaaaacatctagaataatgtttgacaaatatttgggcaccccatggcccagtcaaattggcatataaaattaaccatcagagcctgtagaggatgagttaaaggatggaatcttcggagataattgtggaatccagaaggctgacagataatagaatcaaactacacagaaaaaaaaaaaaaagaagctggtattgtcagcacagacttactcaacaaacagcaaaaatcctaggatagagaccttcctgaatcgttagcgatataagcttattatacttgaatgttgccttcctatatgccatatgtaatataaggcagcagttagatatagactgtgatgccagagctcagaccaagagccaaggaataggaagaccagaaaaatattttcattttaaaaagttaggtaatttctaataatgtggctgcctgagtattttcagcacagatattctaataaatattgtgttatgtgatttagaaagagacaggcactcagcggatgacccttgtcaggaaacactgcatcaaagaaggcttttattacaggagatggaggtccttcccaatctgagattatgctgctgtgacatgatactttacttcacaggcaatacagcaggaaatatgaaaagaatgaacaaggtcttagaaaatacatgaatgagagacacatcaatggctatttaaggaaatagaagatattttgggtgccctgcctacttcctcccagtgcccctaagcttggtgactttgagtgttggctgataatagttgttcccattctctggaggcttatcctccaccaacagtgtcacttcacatgagattttatcccaactctggggcagtctgcaggaaattactttatatctgttctaagataagtgatgtttccaggaatagagtcatatttatggggcagaagattcgtgtactgccagtgagagggtcaatatacctactaatgaaatgggagggcagcctgaaattaaatcagttatctcagggtcttactacctcacctcattttaagttcaaagcatggctcccctaaatcaatccagacctaaattttaacttagtacaaagaggacacacaaattttcagacttaagccatttccagagactgacttttaatcatgatttcctactactattctgcttacatttaggaagacctatgagcagaatgcagttcaggaggaacttaactgatgtgaaatgtcaggcaccaaaatgtgaccctcatggttcaccacattgcacccatactcattttaaaatctcatagttgggctaagttccaggataaatttaggatttaagactgatgagacaatagaaattctcagatccttatttctctgacagactatgagatgattgtattcaagtacaaattgtcagacaaagccagggattaaagaatacctccaccatgtcccctttttaacattactacaggacacttaaataaaattttttaaacttgatttatattgctccagaagcagtaactctgattcttgggcaagacttaccaagagacagaaaacaagcttactgtttgaaagaacttatcagcagcactcatttgtgagtatatataacaaacaatcttatttgaaaccaagaaaagattaagtgtgagggattattaagctttgtctaagttgagtgagcttattggctacagggttaaggaataacaaaagtaggcttcacggtatcttctttttgaggtggggaatcatacaaggcaaaggtagttagatagcatgacttccatgtgctggatgaagctacaattctgttttctttttgcaaagaaaatatggggctttaagaacacagttctggagcccacttccttctccaaaggaggcttgaaaaaaaatatcccagtagcctaattatccagcatcaagacagatactggggaacaattttgaatacaaataacctcacaaattaaccctgttagcagtcttcagagataccatttaaaccaatttctacaccaggactcagcaattacctctccccttaatttctgataccccaggtcaggctctagtgactatgggagaatggaatgaaggtaattgagaggaaaataaagactaatcttcttggattctcttccaccacatagttgttgcaagagggtaaatagagaaaagaggcaagatatctgtatctacagattctgccgggtgtatcaacctccaacataaaagttcaacttcctagcaaatgttaactctgaaataaaaacagtagttttatgtgatgggtgcttacatgaataattaagagttctgagttgatatctagaagttcttgttagctcagcgctattaagaacacttttcctacaatagaaattttctttggaagaggcaggagaggaaagagactgactctgggagtgaatgtgcagggtggggtcaccatgacacctgtaggtctctatactacctctcctcctcctcttgatgcagttctctaggctcagttttctctatcttacatccacctatgttccctttctgccttcttcctcctctactttgtagctcccacattttcagcttatatattagccaattagtatattagtaatattttgaagtcactgttcttacctaagtcagtttaacaatcagcataccagtcagttagtgatcaatgtgttaatcataaagtaattaaaattttataaataaccttacaatcaatatgtcaaactctgtcattgcttccagggccattggtgtgttaatacaacacttagtaaagtaagcaatgttagtgttggagtgggagtagaaccgtgttttttactacaatgagttagagccactaggtctgagagactagtaaaagaatgtaaacagtaaaaattttgtgctaagttttatgctaaagtctgggtgatgcaaaagagacatctggggtttagttagagagggcaaaataagagacaatatagaaatagatacaacaaaagggtgatggatataggaagaacgacacaggaaaacaataggatagggatgacgtacagctgcaccctatgtacctgagcagatggtgcagaaatgatcagtgctgcccagccaagcccagcctaaataagttgaaccatgcattagagtgaaaaataaatgtttaatgttgtcagccactgatgctatacagggctttgtgatgtgacaattctgtgataatagataaatgatacaataatttacataaaccctgtaaatattagtttattatagaactctataaactcttaataaaatatggataatagtaatactttgcattagttttctattgttatacataaattactgcaacttgagctgcttcaaacattattagtttattatatcacatttctataggtctgcactctcataggcttaactgagttctctgcttagggtatcataaggtcaaattcaaaatatcgggagggctgggctcttatccaaaggctctggggaagaattcgcttccacgttcattcagattgtagtcagagctcagtttctttttttttcttttttttttttttttttttgagatggagtctcgctctgtcacccagcctggagtgcagtggcacaatctcttgctccctgcaacctgtgcctcccgggttcaagcaattctcctgcctcagtttcccaagtagctggaactacaggcaactgcaaccacacctggctaatttttatattttttggtagggatggaatttcaccatgttggccaggctggtctggaactcctgacctcaggtgatccgcccgccttggcctcccaaagtgctgggattacaggcttgaatgagccattgcacccggctgtcagagttcagtttcctactgctgaactctgaagtccctgtttgtttttgtttttgttttttgtttgtttgtttgcaggctgttagctaggatgcccgttctgtacctaggggcttcttgcattccttcttttgtgacctccttatatttcaaaccagcaactgacccatgaacctttctcaaattttgaatatgtctggcttcctattctcctactacttggtgaaaactctgcttttaggggctcatggaattagactaggttcccctgagtaatttccttttcaattaactcaaagtcaatagatcagcaactttaattacatctgtataaccccaagcatgatattgtatcatattcacagtcctagaaattaggataggaaatcttgtggtagaaaggtttttaaaattatgcctatcacaccatttaaaaaatagctagtgagagaggagactttcttttccaatatatgtgttagttttaaagtatgtgtgaaataatttttattcttaacatttttttgatgaagcacaatgtctgaaagggtggtagaaagcagctggagtcgaaactgaggatgaagtcgtatagtctagagctgtgctgtccaaaacagtagcatctggttagcttgagtcagaattttctgtaagtgtaaacactcgattttgaagaatttgtaccaaaaaaaaatcgtgggaactatctcatatatgatttttatgctgattatctattaaaatgataatatttttgatatagtagcttaaataagacatactaatattaattttaccacttttctttttactccttttaatgtgactaccagaacatttaacatcacatatttagctctaattatatttccaccacatagtgctggtctagagagctgttttgtttgtttgtttctcctcaggtatccaccatgtcacccaccattactgctgccccttttctcctcactggctttccaggtctggagagatttcatccttggagttctatctccttctttatcatctatgtctctacagtccttggcaatggcagcctcctcctctttatcagagaagactgcactcttcatgagcccgtgtactactctctgactatactggcagccatagaccttggtgtaactttgacaacaatgtccactgtccttggtgttctctggctagatcacaggaaaatgagccatggagcctgcttcctccaggcctatctaatccactccctctctatcgtggagtccagagtgttgctcatcatggcccatgactgttttattggcatccataatcccctgagatacacctccattctcaccaatgctaaggtggtgaagatagatctgggggttcaaatgaggggatttgttatgctaattgtgcccataatcatcaccctctctggattcccctactgtcaatcccatgtcctctcccatgctttctgcctgcaccagatgtgatcaaactggcctgtgcagacatcacctttaatagactttatcctatagtcctggtctcatcaactggtttcttggactttgtgcttatccttatctcttacattctgatccttaagaaggtcatgggaattgcctcagacaaggagcagactaaggccctaaatacttgtatttctcacattagctgtgttctggtttttaatgtcacttgattgggctaccaccctttcagacactgtgcttcatcaaaaaaatgttaagaataaaaattatttcacacatactttaaaactaacacgtcacaatgcaaatcaaaaccacaaagagataccatctcacaccagttagaatggcaatcattaaaaagtcagggaacaacaggtgctggagaggatgtggagaaataggaacacttttacactcttggtgggactgtaaactagttcaaccattgtggaagtcagtgtggcgattcctcagggatctagaactagaaataccatttgacccagccatcccattactgggtatatacccaacggattataaatcatgctgctataaagacacatgcacacgtatgtttactgtggcactattcacaatagcaaagacttggaaccaacccaaatgtccaacaatgatagactgaattaagaaaatgtggcacatatacaccatggaatactatgcagccataaaaaatgaagagttcatgtcatttgtagggacatggatgaaactggaaaccatcattctcagcaaactatcgcaaggacaaaaaaccaagcactgcatgttctcactcataggtgggaattgaacaatgagaacacatggacacaggaaggggaacaacacactccggggactgttgtgaggtggggggaagggggagagagagcattaggagatatacctaatgctaagtgacaagttaatgggtgcagcacaccaacatggcacatgtatacatatgtaacaaacctgcacattgtgcacatgtaccctaaaacttaaagtataataataataataataaaaatacattattttggattaacaaaaaccaacaggctaccacagattctctttgtgttcaattttctcacatgttttgttattctggctctgctagaattctcttgatttgagtttgtcatattttctctttccccatagcctgtgtattttttcttcctttataaactgtaccccacttatacaaacactatatttgttaccttccttgtttttcaattattagcttaaataatatttcttttgagaaattttcccctgccccaaagatgctttctgtgggctccctttagcatgctaccatctatgcagtaatgatagtgctatgaaaatttgtggtaactattttctttatattacacactatttacattctgtgaataaagactatgctcctcattgtgtatctggcaaaaaaaaaaaaaaagggcaatgagctacaagtaatataattttaagataaaaagctgaatgtcagccgggcgcagtgactcacacctgcaatcccagcactttgggaggccaaggagggtggatcacgaggtcaagagatcgagaccatcctggccaatatggtgaaaccccgtgtctactaaaaatacaaaaattagctgggtgtggtgacgcgctactgtagtcccagcttctcaggaggctgtggcaggagaatcacttgaacctgggaggtggagtttgcagtgagctgagattgtgctactgcactccagcctggcgacagagtgagactctatctaaaaaaaaaaaaaaaaaaaaaaaaaaaagctgaatgtcatgaatctgcatgactattaacagatccattgaagttccagtagataagaacaaattttaccaaagtaacaggaaagacaaaaacgcaattggaattcataagctctaggacccgtagaggtacatatgatccctgaagacaaccgatatcccctaaccctttcaaataaactaagttatgatgctgagcctccttgggtcacataaccaagccctggtatccctatcttacatcagctggtttttgaatttcaaattttcctcaccccattcttcaggaaacacctgaaaatcccgaggacatcagttgtggggccctgttcctcccgaacagagaagagagggaagggagatcaaggggtctcctgagatgctagaaagatgaaactcaggggaggtgatttccacatgcataagctttaaaatgaggcctcatgagaggtctgtgagtgaatgatctgaactgagtcctcaaagaggacaggaataggttcctattttagccacaatactgtgagtgggtgagtgccaggaacttgaatatggaatgattcctctctcttctgatgtgagatgcactcaaggaaagcatataagaaggttttccagaggtctgcctagaggtaaagatcacagctgaggtgggatatcctacagcacagatttttttttttcttttttgaaagagtatttaaggaactgtgatagatttaggttttctaatctgggacccttggattggcataagtataattgttaatgctcagaactgcatgtgtcattgtgcattcttactcatttttctatgtagatgtttatagcttttttttcagagaatatttcttcattccaaaacagctttgttatcactcacctcctttgttcagttattggtaaatatattacatttatatttgtaatagttccagcaatgcaattctattttttattgtaatacattcatttttgaaaataagaagcagaaaggaatatgtatgcataatgtcttctataatgacatgactatctttactggtgcttttgtcattttatgtagattcaaatgatcatctttggtcatttggtttcaacttagttgaaatcaactcagtttttgtttatccagaaagggcttattttacgtttattttttattgataactttcctgttcagaggattttttgttgatagtttttctctgaagagtagacaaaaaattctgaatcgagttgaaaggcttagaaaagggcagccaaattaagatctaagaaagcaaattggattgaaaatgaaatcatattgatggcagatgataatatattggactgggttggagaaggcaggaggaatttaacttgtggacaatagaaatctgagagttgggtagtcccaactgtcaggccctcaggactggggccaaatggaggactcacttttttgaagattaaagacaatgcgtgagagcacggagttctgaacctaaacaggctgagcttctgcactctgctaagatcctgaaatttatagaaagaaaagtcaccattttaacatataacaatttaatttataagatccaaacaacaccccttgaaacacacacatgcatgtgtgtctgtgtgtttgtttgaagaactgctctaagagatggcatgagtagtcagtgggactcactagaaaaattctagagacagggcccatctccttaggaaggtgcggggacacatcttccatccaactcagaaggagggcagagtaggaaatgagaagatgagggaaaggaggaatcatattttttcctctttcacttgtttatgtagactgtataatagattcactatttactacattttcttgaggctaacagatctttcctgtctgttccttcttcatactacaaagttccctctgtctcctttactcccttgtatctggtaacattcaaattatgttctcaaagtgagcatgacaacttttttccatggacctgtatgtatttatgcatcttggtgagagtgttgctacaagtataggaatcttattcatctagaaatatatcatcatgtgaaattcaggtcaatagaacatctagaatgaagctagaatgaagcagggcttagatctatgatttttctcaagttttcagcattatggatcctgttgagacattcaagggcaatattctgcataaaattgaagggagaatattaagcactattataaactcataggccatattgagagcttcttaagagcagactgtgcttattacatggttatttagaactaaacacagtgcagttgtgtggcatgtgctcaccaattctgtgctgactcaaaatagtcattttccaacttgtcccagatggtattggtgaatggagctcctacaggttgcttatatcttcatatatgatatatcagttcaaggaaaaatcatcacacatcaagtcaggaccccagatccttaggaaatcactaaacatttatgttctgagttgagagctgcctatcaatttcacagccatagctgctccacctttatccagaaaaactagttcttgtgcttctagtataattttcttaacacttgttaatagctaagccatctgaatggaattttgccacatagtgcagccttgggagcatgcatacagtatggcttcatctctggtgacactgcttatagtgggcctcagtttgatgacagtatctagctctcctagaatccccacacgcctgcctctgggtaaatatcaacggcttcccagtgttgggcaggcttcttttgtgtttctttttattcccaaaatctcagacatgatttacctttcattttctttgaggtaccataaccttccctgtcttacttttaatgacccaagcttagagatggagggagatatgactgtaaacatttttttctgctcataaatataataaaaaactttcttttttggtttcaagtgttttatggccaatttctctaaagacgttattgttttttaaggaaaagctcacaaacattttaaaaagtacttgtgctctggaaatctagtttgatccttacacaattttttttaaaggaatcccagattttatggctttctttttaaaaattttttatttttaaaattttttaaaactttaattaaaaaaaattttaatgtgactttcttctatgtttacccttcagaatatgtgtcaccaatttgtcctttctctaatctgccattctcttcctcctatacctcattccgtacatcctcttattcctcaatctgtgtttttaagcatgaaggatctttcgaaggtagaacaacatttgtgtaataattataattcagtcttctatatgaattcaatgtgatttaattttagggattccctagtgttggtgatttcaatctcagtaagttagtaatcctgactcacaggagctgatacagaggtagcatcagaacatttccttatacaatatgaaatgctttgtgatttcttctgattctgatttatttttgatactgaggccattttatgaagaaaactgctaggtgctaaagacttgcctccaggattctgaatttctcgttaaataagactgcagcagagctggtaataagcttcttctttctcccatacccctcttggatcgtggcaaccaagaaaacagaaacagtagtgatggctggcatccttaggctgtggaaacattataattttacctgttacagaactgcaacagttcctcaggagtttggagttgatggaaaagcagagagaggtaagaaggacagaaaaccagctaagtatttaattatgggaaataatgttggaaagggcaagtggcagaaagaaagccagtaaatggtgaaagaaacataaaaaagataattgtatgaagatatttggagaaaatgagaaaatcaactggatggaagcattaaaaggtttctatctcgaaagatggattaggtatgaaatgcttatagcagtgatgcccagacattgttttgcactggaatcacctgaggacctgaaaaaagcgaatttgattcagaatgttggaaggggcagaatctgaggctgcatgcctaacaagcccgctgcttgttagctgcgtctagtctgtgatccacaactctggtggccaagctcaagtaactgttagagtgacaaagccgttcattggtagtgatggtgatgcacgctatagtgcataaaacactgacattcaatttccaaaaaaaatgagaaaaactgcattaactgaaaaaactgtcttcatcataatcgtgaaatgtaaaattacaacaatcatttccaaatggtcagtaatcacagcaagaagacaactaagccagattattatccatttatgtatatttatgttatgtgtttttgttatcactgttgttgcaaatatttataagtaccctcaaaatagttgcggataatatatttaaaattaatgaaaaatttttgaatttgagaaaaatcgaaccattaactcagtattttttctaattagggaaaaaaccatagtctgtacatgctattcttcttcaggaaaatagttgcagagtcaaatttatcacaccagttaatcatctccaagcaggaagattggaggctcctggtttcaaggtttcaagaaatctgatctttaccggtggatacactatgtggcccaatattactgcagccccttttttgctgactggctttccagggctggaggcagctcatcactggatctccatccccttctttgctgtttatgtgtgcatccttctgggcaatggcatgctcctctacctcatcaagcatgaccacagtcttcatgagcccatgtactacttcctcaccatgctggcaggcacagacctcatggtgacattgaccacgatgcctactgtaatgggcatcctatgggtgaatcacagggagattagcagtgtgggctgcttcctacaggcttactttattcactccctttctgttgtggaatcaggttccctcctggcaatggcatatgattgtttcattgccatccgcaatcctttgagatatgcttccattctcaccaatactagagtcatagcgttaggagtgggagtgtttctaaggggttttgtatccatcctgcctgtaattttgcgtcttttttcattttcatattgcaaatctcatgttatcacacgtgctttctgcctccaccaagaaatcatgagactggcttgtgctgacataactttcaatagactttaccctgtaattttgatctctttaacaatcttcctagactgtctgatcatcctcttctcctatattctaattcttaatactgtcataggcattgcttctggtgaagagagagccaaagccctcaatacctgtatctcccacattagttgtgttcttatcttctatgttacagtgatgggtttgacattcatttacagatttgggaagaatgtgccagaggttgtccacattatcatgagttacatctacttcctctttcctcctttaatgaaccctgtcatctacagcatcaaaaccaagcaaatacaatatggcattatccgccttttatctaaacataggtttagtagttaaactcggatctggagaatcagacacagacataaaaatgaagccagaatgaaaaatgaaagcctggagttctttcttagcaaagagcaagggtatactggaagacaatgttgtcactcacaaggacttaagtactttaccatagggttgggggcatatcttaggagaagtctggtgacagaacactgaatagaccatatggaactgaaaaagtctatatttaaattcttctttcaaatgcacctgaaattagccacctcagtgaaatttgaggaaaaggcagaacatataatctctatgaaaaacttttgcctcagtgtgcacatttgtgcatacatgtttatgtgtttgcataggctaatgcacacaagtgtaaaaaaaaaagttgatcatcattctctagaaataaattcttatttaaaattttcattattctcatggcaaatatagtgataagaaactaacattttaaatttacttttaaataagtaagtgttggttatcttttaactgtcctctaccctgagttagggtactctctagggccatgatttgcatttaatattttctaaatacagtcgtaagtcacttacagagtatttcaataagagctttttaattttcaatacattccttgcaggatgtctggattttataaaagtgtatttctttacctcattcttctataaatattcttttgcccaaaaaaatcttagaaggaaaaacctagacaagcttcttgtcagctcgtaaaaaagtaaaaagtgagtttttaagagtatgtttgctcttcagatgattttaacatacttttcccttggcctaataataggaagggtcaaggctctattcaaaaatagaaaatatagccattctagaatgaaaaatatgagacatcattacttcacaagttatatatactttatatatgttcagagggaaaaattagaaatggtgattcttttgccataaatactttctctgacatctactgtaaactctctatattaggaagaccaacaatgttgagagaaatggatttcaattcatccaatgactaaaaaattgtggtgggaggagtttttgtgtgactgtgtactaaaagcttcttttagactgatttaattgtgaaacaggattttcatccacaaatttcaaaaggggaaaacctatctcagagtataatgttcaagttattgatgctgaatataaactcaaatcctaaaagtcagttatctaccaaagactttctctgttccttatatgtgaccatgaggtctataatacatctaggcatcttaatggaaaaatctcatttcggataattcccatcttgatttgctatcttgatgcagaacctcttgtagctgaggaaagcctgcctttgtttcccatctttgtagaacagaagctgtgggacatcacaagttgctgtggtaatcacaagttactgcgatattatatccccatctgatatctaaattttgaggataggctatctgttttacagtgatacatttgatggaaggactcttagtttaactggccaaggccaggacttcaagccatagtttaattacctgccacatgtgtgagaaataaggaagtttcaaaccatgatggagcagcatcactggcatgccttttgtgtatatggtgggttgaggatatggcaatattgcagcctcactgaataggtataaggaggtgcttactttggataagcagtgttgtttccaagatgaaagaagcccaaattattgggaaatatgtttattattaatgacgttgtccttaaactggtttagacgttgaattctctgttcttggtgccttcatggttgtttaaagaaaatatttttcaaattgattctaagagggtgatctgaatccactagcattttatttcattgagacttttcatcttttacatagaaggaaactaagttattagtgctctgaaatatcaactttcatgataaaagatacacagtcccttctgagggcacaagccaatacttcattaaaccaaaccagctatcactcttctgtcatatttttaataaggaggacagcttcctttaaattctctaaaaacaaaataatatccttattcagccttcccactttaccacatgacctgattaacctattaatgacactgtactatgtcaattatgatatcctgtctttacctatatgttaatgaaactgttagaaaagaaaatgatatgagtaattttctccagggtatcctttgtgcaaagcacttcattgaaactgattctcttcatcttttctacaaagtcagcatgtaaaacactcattaatgtacaatgaccaatcaataaataactgttgattagtgaataaagtcattatcttcttgtgataactatggaagtcaatggaactactctccattcagcaaaactcagaaattcaggtggcattacttacgcttctttctctttaatctactaccttcaatcactcagttctattctaagtcatagaatctctcttctattcaagcctttctaatgctactgataacaactagtcaaaaccacaccaacacaatttgacacgtgtattgtcatatcctgatacttcttttacctgttctcccccttttccaacatgtttctcatactgtagccatagtaactttaaacaataactacttgattataagtactcatcatacctcttgttttatattcattcccttatggtaatgtcaaaatgttttacatgatttgcaagatatattgtgatcagaacctgctactactacagattcattttctctcaagctttttttcatgtattgttgttcaagagatattatacttccttaatgtatattttgaataaaattatttttatttgaatttatagtatttaatcttgccccattaccaatgtacattttacaaactttaatttgtttacttgtttcgttttgtgtttgttcttttcacctgtacgcaatgattgcactaccccaccaaatactactacactactaatatagtagcatttaattctcagcttaagtagcatttcttctggaaaatgttccctgatcccagaaatttatttgatgtgtctctcatagcacactaatattcacgtagtaatgatagtgttgtatgaattcatggtaaatattttctttctagtgcctgcttgggttttaaatttcaataaaaagaacaagtcctaggtatttcattttctttgtggctgttcttaatgggattgtgttctcgatttgactctcagcctgggccttattggtgtatggaaatgctactgatttttgtatgtgattttgtatcctgaaaccttgctaaaattgtttatcagttctagcagccttttggaagaatctgtaggattttctaagtatagagtcatatcatcagcaaagagagatagtttggcttattgtcctattttgatgccatttctttctttctctcgcctgattgccctggttaggacttccaattttatgttcactaggagtggtgagaatgggaatccttgtcttgttgcagttttcgaggagaatagttccagcttttgcccattcagtatggttttggttatgggtttttcatacgtggcttttattcttttgaggtatgttcctttgatgcctagtctgttggaggtttttatcatgaagggatgttgaattttattgaaaggtttttctcagtctattgagatgatcatatggtttgtgggaggtgaaagatctctacaaggagaactacaaaacactgctgaaagaaatcagaaacaacacaaataaataaataaaagctttccaggctcatggattggaagaatcaatatgaatttaaatggccatactgctcaaagcaatttagacattcattgcaatttctatccaattaccaatgtcattcttcacagtattagaaaaactagtttaaaattcatatggaaccaaaaagagcctgaacaggcaaagcaatcttaagcagaaagaacaaaattggaagcaccacaccacctgacttgaaactacaggccaggcacggtggctcacgcctgtaactctagcactttagggggctgaggtgggtgtatcacctgaggtcaggagttcaagaccagcctggtcaacatggtgaaacactgtctctactaaaaatacaaaattagccggctgtggtggtgggggctgtaatcccagctactcggaaggctgaggcaggagaattgcttgaactctggaggcagacggtgcagtgagccaagatcgcaccactgcactccagcctgggtgacagagtgaaactctgaaaaaataaaaaaagaaagaaaagaaagaaagagagggaagaaaggaaagaaactacattataaggccacagtaccccaaacagcatgatattgttacaaaaatagacacattgactaaggaaacacaatagaaaactcaaaaataaagctacatagttacaaccatctgatcttcaacaacactgacaaaaacaagcagcgggaaaaggactacctatccaataaactgtgctggaatacgtggctagccatatgcagaagaatgaaactagacccttaccttacaccatttagagaaatcaactgaaaatgaattcaaaacttaaatgtaagatctcaaatcttacctgcactggcagtgcatttttggctaagcccccaaaagcaattgcaatgcaaagaaaaattcacaagtggaacctaattaaactaaagagcttcactattcacaataacaaagacttggaaccaacccaaatgtccaacaatgatagaatggattaagaaaatgtggcacatatacaccatggaatactatgcagccataaaaaatgatgagttcatgtcctttgtagggacatggatgaagctggaaaccatcattctcagcaaactatcacaaggacaaaaaaccaaataccacatgttctcacttataggtgggaattgaacaatgagaacacttggacagaggaaggggaacatcacacaccagggcctgttgtggggtgggggtggggggtggagagggatagcattaggagatatacctaatgtaaatgatgagttaatgggtgcagcacaccaacatggcacatgtatacatatgtaacaaacctgcacgttgcgcacatgtaccctagaacttaaagtataataataataataaaaagagcttctgtgcagcagaagaaactatcaacagagtaaactgacaatctacaggataggagaaactattcacaaactgtgcatctggaaaaggtctaatattcagaatctataaggaattcgaacatatcagcaagcaaaaagcaaacaattccatttaaaaatgggcaaaatccacgaacagactcttctcaagagaagacatacaggcagccaacaaatatatacaaaaatgatcatcatcactaatgagagaaatgcaaatcaaaaccacaagagatactatctcataccagtcagaatagctatttttaaaaagccaaaaaacagattctcatgaggctatggagaaaagggaacacttatacaatgatgatggggatgtaaattagttcaaccactgcagaaaacagtttggagagtcttcaaagaactttaagcagagctacaatttgacacagcaatcccgctactgggtatatatccataggaaaacagagcattagaccaactagacacatgcacttgcatgttcactgtaatgctgtttagaatagcaaatacaaataactggcctaggtgtctatcaaaggcggacgggataaagaaactgtggtacatatacaccaccactatgtggcaataagaacaaatgaaatcatgtccttttcagcaacatgggtggagctggaggctataatcctaagcaaattaacgcaagaacacaaaagcaaataccatatattctcatttataagtggaagctaaacattgagtacacgtggatataaacatgggaacaatagccacttgaaactactacaaggggcagggagagatgcgggagagggttaaaaaatctattggatagtatgctcaccactgcatgcaatatatccatgtaaaaaacctgcacaagtacccactgtatctaaagtaaatgttgaaaatttaaaagaaaaaacaaataaataaaaacaagtctatcctgaacctggtatgaaatgggcagtgatttttatataaacaaagttattttaagacaaaatataataggcccttcatttacttggctattaatagatccattgaggttcctgtggatcagaactgattttcccaaagtatcagaaaagacaacaatgcaattgaaatgcataaactccaggacaaagacacatgtgaccctgcattcaactagtatctctcaatactttgcattgtattgagacagacaatgcaaagtacacacatggatatactgtgtactgatgcttagggtcctgaagggtcacataattaagtcctggcatcccaatgtagaggtggcattggagtatgcagcttttctcatccatccttggagaaatacctgaaagttccgaggacattggttgagcgtccctgcttctcccagacagaggagggaggggagatcaagggttcttctgagtatttggaaagaggaaactctggggaagtgatttccacatacataaactctctaatttggcctcttgaatagtctttgagaagtgagtgtctgaactgagtcttcaaatagagcaggaatgggtccttattccagcaagaaaatgacagcataggtgagtgccaggaacaggaataaggaatgattcctcttccttcttatgttagatgcagcgaagagaagataggaagattttcagaggtctgcataggagaacatactccatctgggatgaccaacacctaaagcacagactttttcatctcaacacatgtttcaaggcaggcttgaagtttcaaatgtggtgctcatggattagcttcaggaaaacgtgtgaatatttttagactaaatgtgacgtcacctgcttttgtccatttttctccacagagggctcatggcttttgttagaattccataaaacattaacattctatttcaaaactaaacaaagaaaagttttctaacaaaacactatgtctatatcatgattgtgaaacataaaataaaaatcaagtttaaatgtatccaaatatgcaattaagctaagcagcaggttaactatgtacaattattatctaattgcatatatttgccttcttttttgttactattggttcaaacattgtgcagcaagcacaccacagaggggcatgatgcattttttaaaatgtgttttttagattaagaatgcttaactacttaattattcataactgaagaaatgatcatcattccttatctctagcacagtctataaatgtattgctcttctataagaaaattgttgcacattcatgcatataccaataaattattgctaaatatgaatattaggattgaggctgcagaaatacagtttcacaagaaggtagtaaaaactgataaggcagggatttcagtgtaatagtttctataaagctacttgccacttgtgaacacacaatgcggctccttttttgctgcctggcttttcagtactggaggcaacttatcactcgatctccatccccttctttgctgtttatgtgtgcgtccttcttggcaatggcaagctcctctacctcatcaagcatgaccacagtcttcacgaacccatgtactgtttccttgccacactgaggcaagacctcatggtgaaattgaccatgatgcccactgtaatgggcgtcttgtggatgaatcacaaagaggttatccatggggcctgcttcttgcaggtttacattatccactcccattatccacttgcagaatcaggtattctcctgtcaatggcctatgaccgtttcattatcatccacatgcttctcaggtataactatttctactaaatcttgggtgaagatagaactgtggctatttatgagggactttttatccctcgtgcctccaattctgccactccattgcttcccatattgtcattcccatgttctcttccacaccttttttctccatcaagatgtcctgaaacttgcctgtgctgatattacattcaatcacttatacccagctattctggttgctttgattttcttcctagacgctctgatcattgtcttttcttatatcctgatccttaaaacagttaaaggtattgcctccagaaaagagcaagccaaagctctcaacatgtgtgtctcccatatcagctgtgtcttggtatttcacatcaccgtgatcagtgagactttcattcacaggtttgggaaacatgcaccacatgtggtgcacattaccgtgagctaatgactcatttctttttcctccattcatgaaccctattatatacagcatcaaaccaagcagatccaaagaagcattgttcgcctattttctgggcacagaatggcttgagcccttttttcagaattttgtgatcttcatgatttctgggccttttgagtaattggaaaggagcttattttatacccaatatctcttgtatcagtgttagataggctttaactattatctaaagtgaaaagctacatggaacaataatacaatgaatgtatccatcaattgatcaattgataaatacataaatatatgtataaatgtattcatatgtagatgtaaagctttatcgagggagatatatctataatttacctatctattgagagatactaggaaagtggaatactattgaatatggagataaaacatgtagataaataccctaataatcagggaaaatatggttattcataacctgtattcataagaactgaaagtaccattttaggaagagtcaagtggccagtctagttcaaccaaagcctacagaaggaaaaatgtgcaattgcagatctagttttggccatataaagatgaattatagcatgtgaattgaggtcatggaactctactataatctcaaaactactctatttcagggtagattttccttttttttttttttttttaaaatagattttattttccttcaacttattaggtaggtgcaaaggtaattgcagttcacagaaattacttttgtaccaacataatatattttaagttccagggcacatgtgcaggatgtgcaggtttattacataggtaaatgtgtgccatgcaggtttgctgcattcgttagctattcttcctggtgctctccctctcctccccacccactaccggacaggcccctgtgtgtgttgttccccacaagtgtccatgtgttctcactgttcagctcccatttctgtgtgagaacatgtgtgtttggttttctgttcctgtgttagtttgatgaggataatggcttccagctccattcatgtccctgcaaggaacacaatccttttcctttttatggctgtatagtattccatggtatatatgtaccacgttttctttatccactctatcattgatggacatttgggttgattccacatcttggctattatgaataatgctgcaatgaacataagcatgcctgtatttttataatagattgatttatattcctttgggtatatacccagtaatgagattgctgagtcaagtggtatttctgcttctacatctttgaggaaaggctacactctcttccacaatgtttgaactaatttactctcccgttaacagtgtaaaagcattccattcctttctctctgcaaccttgccagcaactgttgtttcttgactttttaataattgccattctgactggtgtgagatggtatcccattgtggttttgatttgcatttttctaatgaccagtaaggttgagctttttttttttcatatgtttattagaagcatgaatgtcttctttagagaagtgtctattcatgtcattccccactttttaatggggttgtttttttcttgtaaatttgttttagttcctcatagactccagatattagacttttgtcagatggagaaattgcaaaaattttcttctattctgtaggttgtctgttatctctgatgatagtttcttttgctgtgcagaagctctttaatttaattagatcccatttgtcaatttttttttgcagttgcttttggtgtcttgagttttctttcaaaatgatacaatgtcatctataaagttttacagtagagactctctaaattcataaatttcctagttgctcatttcatgagttaatgtatttcttttgatcttgtgttctctctaaatgctggatagaaacatttctgatatgtccaatagatgaaatataatctgatattttcctttttgtatattcaatttattttttattctaataaatcacaagtgatctcaatttgttgcagcaacttggaaatctcactaggatttatttgatcatatattttgctaattttcatccttttataattgattttaagaagtttattatgtattatctctagtgttttatttttagtgtacgtattttcccagttttctgtttgtcttgctatatacacaatttaaaagcttacatatacattattttattatttactttatctactgaagtattggagccatactatcaaagcccttgctgacttcaggtttatttatatctttttcttatacttttgcctaatttatttgtacatatcctatgtttaaaagggtttgtgtttggaggagagtaggactttaaatcattcctcatgtgcctattttcgtggaaacaccactaatatttaatcattcctttggttaattttttaagggcactattatgggtcaccttgctaagcaaaaatgatataagagagcaaatagacaaacttttcttcttaaagtcttcaaataagtggggactcaaagaataaaagaaatccaaatttaaaacaagtgctgtgattaatcataaagcagaaagaagacactgaatggagagtgtgggtctcaaaaaaggcttgaggttatggcttgaaataagggtaagattccctgagaaagtgtcccttcagctgagacctgaaaatggattagaaactaactggtgaaaatacagacaagaatattctaagactgaaggagtgtgtgtggagacctcagctaggttggtttatattagggaaggtggctactggaagagggtgtttgctttgagaagaggctgaagagggaaggaatggccttattggtcatcataagagtttgagtctctactcggagtcatggaaagctactgaaagaagctgcataattcattgatgttttaaaattacttcaatattatttataaaatggaattgagggaggcagggaaagggcagaatattagagtaatttgaagaaagataatagtaactcaatttaggaaagtggaaatggtaatggagagatatgacaaatatttaaggtctaaatataataaggtttacaggttatttagaaaagcagaggaaagaaagagttggaaaggagcaaaaatcaccatcaatttctgacatgttcttggaagaaaggcagtgccaaaagaaaggcagtcactgattatgtattgtctataaataagaagaatcattataatttttaaagttgtgggacactgagaatgagtcaaaataataaacatgtgatttaagaaagcaattgaaggaagtatttcaaactgtagaactagacttttaaaaacaaaatattagcttaataattaaaaaaatcattcattcaaatcatttcagtatgtatttctttttgcctgatcatgaagagtcatagtaaaggcaagacatatgtcagaaaatgatgagaatttacagatgcaagacaacagaaacaaactgaagcagatgacacccaaagaaggtcagagaataagtgaaacagtggctcactatcctaggagaaagcaggatagatccgggtttttcttgggtgtcattcactgaagtagacccagttttaaaatagcagtccaaaaaatactgccaaacgtgagataatatatcaattatatgatacaactggttagagccagataatctgatacaaacataaataggaagatggattaactaaattctgaattaccagatgagtaaataacaagaatttattgaaaaatgaagttttttcatgagtgcttatgttagttaccctagatttgcggcatgccttcacagatgtccaatcatagatatttgaggaggaccatatggaactgaaaataatctatgcttgattctttctctcaagtgaaattgttgagtcaaccatcctattctatttattaaaatcaaataaatggtctttaagatataagagactttatcctagtatgtatatatatagttgtgtttgcatgtgtgtgtggacacctgcacatgtggaataaatcttttaatattttatcttagacataatttttaacctcaaactcttgtttttaaacctttcacaataaatttaatgaattgaaatacatttattgttttatttttatagtggtaatatatacaatttgccactttagcctttttataatgtataatgcagtggcacttattacatttgccatgttgtgcaatcaccaccactatttctaaaattttgtattacaccaaataaaaactctatattgattaatcagttactccccaatccatgttcttcctacactctggtaacttctaatctactttttgtctctatgaatttgcctattctagatagctcatgtaagtgaaatcagacaatgttcttttgcgtatgacttattgcacttaggatagttttttaaggtttattcatgttgtagcatgtgtcagacctactttttatagataaataatattctatcacatatataagacattttgttgatatacgcatctgttgatagatacttgtattgtttctattccttggctactgtgaattattgatgtcttcccttcaatatgcccagattctacctaaatatatctctctacttcctctcactctgaatattctgcttttcaaagaatattccttggaatattccatggaagaagaaaatgagacaagctttctggagaaaggaagttttcagtgccttgatctcggctgactgcaacctctgcctcctgggttcagttttcagttaaagaaatgatttaacaaattttttcactcaactagagattttatgataatgcaatacagataaaagataatgcaatccttccagacctaaaaatatgtggcatccacattttacaggtacattttcacggagaaagataagaactggtgatttgtttgcaacaaatctttgctctggacttcactgagtaaagttttttttgctttgttttgttttgtttttgagatggagtctcgctctgtcgcccaggctggagtgcagtggcgtgatctcagctcactgcaagctctgcctcccgggttcacgccattctcctgcctcagcctcccgagtagctgggactacaggcgcccgccaccacgccaggcaaatttttttgtctttttagtagagacggggtttcactgtgttagccaggatggtctcgatctcccgacctcgtgatccacccgcctcggcctcccaaagtgctgggattacaggcgtgagccaccgcgcccggcctgagtaaagttttatattgggaagacataaaaatgtggagagaaatgagatccaatctatggaatgcttaaaaaaataggtgtaggcgcaagttttctgtatgtccttgtattaaaactttttcatactgaatcaattgtaaaaccgattatttacccaatgcatgctgtaagcaaaattatatgctattgagtacaatgtttaagctattgatactgagtataaacacaaatcttaaaatctggttatcccccaaagactcctctgtttctcataatgtgcccagtaagttcctaatgtttattagtgtgttggtaggaaatttcaaccccgatcatttccatcttgatttgctgacctgggtgcaggttcttatgacagaggaaagactgtctttgtaagttattttggaagaatagaaactgtgaaaaatatatggcttctttggtgctcatgaggtattttgatactgcatgctgctccaatatctaaattatacatctgctcctcttttacagctttatcttaggtggaagggacttcagctaagttggctaaggcccttcaaattaaaactctgttagtttttctcatgcttagtgagaaagatgccaactttctgctatgaaacttcaagttatagttttttcaataacctgcaatttacgtccaagaagaaaggaagattcaatctatcttcagtgatgaccagcatcactgaacggttatctgggcctgttgtggattgtgaatatgacaatatttgaatctctctgacgaggtataagagagggacactcacttttgaatatgcagggctgtttccatgatggaggaaagagattggaggaatgtagatttatgggtgaagttgtttggcttggaagttggatggtcagttccaggtgctaccattggtgctgaaggagaacgtttccaaaatgtctttggggaaatacaatttcctatcgttttgtttagttgacacaaaatcttactcagcaggggcccaaagtgcaattggtctatattatcaactcctctatacatatttagacacttcgcaggtatcaagtcattaccaggagcaccagcttagttgtttcatcttctacaacctcattagattgactgactgtaacttctttcaacgtaatctccagaaaacaagttttactgcataccttcaaccttaaaatgtctcctttcagccttgtccctgtactattagtcctatttgccttgcatagatgtgagatggtacacagtgatttcacttataattttctttctcttcctatatggtaacataactgataagacacaaagaagataaaaaagacatataatgtctgatatattattgttggggtacagttctttattgagaataagagtttcttttcatgtattggtctagctatttagtagtatagatagatcacaggaaattgtagacttggtgtatttagacatcaacaaaaacattttcaaagtagtcttttcattggaatgggagaatataagttccataagtggttaaaacatcttaccttgagactcacttgcagccaaagtactaagaaggaaaaaaacacataaatgtctcttctcatgtggtcacagctatttgggaggctgaggtgtaaaaatcacttaagcctaaaagcttgaggctgcagtaaactatgatctcaccactgcactccctcctgggtgacagagcaagacactgtctcaaaagagaggaaagaaaagaaaagagaataaaaggaaaggaaaggaaagggagaaagaaaggaaggaaggaagaaaaagagagagagaaataaggaaagaaagaaaaaagaaaggaaggaatgagggaaggagggaaggagggaagggggaagggggaagggggagggagggagggaggaaggaaggaaacttcaaaaaatctttcttcttgatgttgttatggatttttctctgaaccatgattgatgtaaaaattagagacatcgaagtactaaacaataaagaaaaggagatagcattgtttggcatgcttgaactagtaatcttattacaaacagatgtagaggttgtaaaggtctacaatttggctacaaaaccaatggcttgatcacaagaatagcattcatttgcttaactagtacttactgagcacccactatatgttaagctccattttaagcactgaaaatgtcactcacttaaaatctttcagaagttttgttttactgtgagtacaaagagaactgactttatgatatggttatttaccaagccgtcacttcttagctacaagtctagaatcaacaggttctgcaaaatgaattctggaatgcatttattgctgtatgacctaaaatcacgttttggcaaaatcttacctgaatatatgagaggatatttaggtttttttcccctaagtataaacaggtgatagtaaatagagtaacttgctgcgagtgtcacatatattatgtagaatatgcattttatcactattttaaatctgaaagactgaatttgacatgttttgagataagagtttagggtagagttgtgtatctgcacgatcttagactacttaaatagaaactcagcacataatccaatgaaaaaagagatttcagaatgggactaatatgacaacatctggattattatgttcaataaggtggagcatcataggaaataaatcaggattaggaataattacatgataaacatttaaaggactgttgatattggttcacccatcaggaaagaagtcttagggtttttaatgcagatatctttatacatctagaaaaaaattatgtatgaatataatggctaatatatggttattttattctggagatcagacctaaatataaggagtagatattatatgtttcagagaagtatatgtctctctctctctctcactgtctctgtctgtgaatatatatatacacacacacatacacacctatgcatacatatattgatagtaaataccatatatacatatactaaataattaaatgaaacccacatatatatgaatgagatagctcagggtagggtagtgagttttgaatcaatagaaagaataaataaatgtctgatgaataatcatcaagacgaaaaggtttggtggtggctcaaggattttgtaaagggttgaattagagaatataatacagtttgaaaaggggcaatgttcttcaaatgttaacatttacaaagacaaagtgactggtcttcccactctaagaccaatggaacacttgagagtgactcatttcggtcatgcctcatctgatgttagagacacaacttctcttagagactctccttccaaagaaaaaataaaggccatggggaccagtttcaatggcccagatctttcccaggttggggaggaaaagagaattatttggtacactattcccaaatatcctatgtggaaatgagctagaataaccccttgagagttgtttgtgtaacaaatatatctctcatcagaattaagagtaaatactgaggatatagcaaacaaccaatattcaggtcatgctcagaaaccgcaaagagaaaactgtggctcaggtaagaaaagccaaggattcaaatacgggaagcaagtttaaccatttccatttgatggacattggttgagaatatgagcttgggttttgggttagataaacctgtgtttgaattcctttatgacacatattagttgcgtgatcttaggctaattgcttaacttgtctaaggctcaatttcctcaccataacaatataaataaaataatatattgtctttactttcttgttttttactcacttttcttttctctctctctctttaacagatttttctctgttgcccaggctagagtgcagtggtgcgatctcagctcactgcgacctcctccaccagggttcaggggattctcatgcctcagcctccagagtagctgggattatgatcatgtgccaccacacctggcttatttttgtaattatagtagtgatggtgttttgccatgttggcccagctggtctcgaactcctgaactcaagtgatccaccctcctcggcctcccaaagtgctgggattataggcatgagccaccgtgcccagctgttttttactcactttttgtctcacagtcattaggcattcatttctgccattatgttgaaattgtcaatattaccaaagacctagttgccccaaacaatcaacacctctatgtttatattaattgataattctatatttttcactattaacctaccatagtatccactcctataaacttcccttttcattgtttttttgtaaatacagatcaactttgctatcctcttacatctgtgcctgcttctttgtctatctcctttgagatctttctttttactgagagcaaaatttgtcctagtttcccaatgtttctctccaaaccttttttttttttttttttgagacagagccttgctttgtcgcccaggctgtagtgcagtggcacaatcttggctcactgcgacgacctctgctccccagtttttttaaagcaattctcctgcctcagcctcccgagtagctgggattacaggcgctcaccaccacacccagctaatttttgtatttttagtagagacagggtttcaccatgttggccaggctagtctcaaactgctgacctcgtgatccacctcagccttccaaagtgctaggattacaggcatgagcctctgtgcctggccacctcttccattttaatttgtacttaaggtaagatataaaaaagtcacttaaaagctgagatttttcagatattttgtcttcatctcatggcttcccattgtcagttgactttaaatatttattttggtatatttattaatttcttctataggaacacaattttggggcaatatgtggagatgaaaaagtggattcaggggacactgattgtacagggcacttgcagattatctggaactaaacggaagactgttcttttttaacacgatcttaatattctctttttgtcttctcattttagtttatgtctttataaatggtttcctgaacagttcctaagctttttgtcagcatggcaagttgaagaagctctggatgatggatctatgttaccttcagaaactcttgaggactctgggatagttgctgtcaaagaatcagtccaaaggcactcagaaaggggcaagagaacagtgagccagtcatttttgcatccctcagggggcctctatgcttgcctgagagtgataaattccactaaagttatgactctcacttttgtcatgtatcacattctaggagactccctaaactattagggcaactattctccctggaatatttgggtatgtggacagtttctggtactaccaaatttgccacaattaaatgccagcgtagctgttttgctagagactgcagatgttaaatagagggctatctttaggtcaataaaatatacttataaattgtattaactatttccccagtaattaccacacagttttaataaaaccctgtgcatccgcatgtcccaaacgcagctcaggttttgaaaacacgactatagtttaagaataatcaggcctcctccggcttcctccatctggtccattatctgggtgacagtagatccaaataagtggttagctcttatcctgtacaacaaattttggcattaatccattctcttataaggcaacattggaaggttaagagaacttataatgatatacacatcactcctgtggcggtagataagttctgccacattaagcactatgcaggtcataattcagtggatcaagttagttagcagtgtttttagtatccatatgaacatagtctctgctactgcagtgcctagactgacatttttgttatcaacagtgtcccctgaagtagcagccctttcaaaagtcctttcacctttcctctgtccatctctctccaccaataattgcttatattagagatgttactatgtgccaaaattctgaaacatataattattattgtttctataggtttttataaaataaaaaaggtgcaaagattgttatcacttcatttttactgaattacacttcaaaggtgtcggtagtaatatttataatattgaatgatattttaaaagactctggacacatacagaatcaattgaatttgggagaaactgagtttcccttgtagttctctttgttttcccaataaacctgctacaaaatttcttggtatcacaacaacaaaaatcttgactttgtaaaagtgtaattataaatataaataaatattaattataaatagacttcatagttccctatgaggatccttgtgaatttttctcaatacgagtcttacagattcataatgattagagggtctgtaagattgtctccatcagcaacatagttgccgtattttctctctgggagtgcttatcttttccctagaactggttgtgtgaagtttattaactcaattaccaacttccgatattactattgcccttcagatcaacatacttacgaatctatgactctaacaagtattaggcttttgtggaggccctcattgtagaagtatgtccttaaaatatttccgttatgagcttccaacatgagtctcctattttcatgtttgtccctaatgtgccaaaactcagactttttgcagcatagggaacttgctgagtcccaagtccactgagtaattacacctttctaaaatgagtttactaactttacccacttgttcaggtgttcagatttctgtggaaactcacaatagatgagttattttctttcgttttattttattttattttttatagagacagagtctgactccgttgcccaggctggagagcagtgctgcaatcatagctccctgcagcctcacagtcctgggctcaggtgatgtgtgcccctgtgcccagctaatttttatcttttcttttttttttggtggaggcagggtctagctatgttgcccaggctgggttctcttcttattcacagtccacttgagatagcaacattgatcacaatatttctcagtcatttctattgaataagcattttcctcagtggttaatcctaaatacagctgtcccattagtttcaagagaaaaaatttgaactgactcaacttggatagtaacacagtaagggcccatatgataaataataggaggaggaataaaagagtaaagagaataaaagggaacaaaggagtcctatttgggaccaagagtcaaggctatgagcacagacgtaagatgagtgttgaaaaaataaaggttgtatgcttcatagtgaattggaattattattctgaccatgatttttgttatttgttattctagggaaaggccttgtgagtacaggcttacaattaattaagtatgagacaatccagaaaaatatttaagttttgaggtaaaaaatggcctgatgatgtgctacaagaagattgtgagagaaaaaagaaaactgcatctttggaggtcatcacccctaaaaaatatcttctccacctgcaaaacctaccatgtggtataacaacagtgctggccccttcttgctgactggcttcttgggctcagaggcagttcactaccggatctctatgtccttctttgtcatctacttctccgtcctttttggaaatggcactcttcttgtcctcatttggaatgatcacagcctccatgagcccatgtactacttcctggctatgctggcagacacggaccttgggatgacattcactacaatgcccacagtcctgggtgtcctgctgctagaccagagggagattgcccatgctgcctgtttcacccaatccttcattcattcactggccattgtagaatcaggtatcttgcttgttttggcctatgactgtttcattgccatccgcacaccactgaggtacaactgcattcttaccaattcccgagtgatgaacataggactgggggtactgatgagaggttttatgtccattttgcccataattctttcactctactgctacccatattgtggttcccgtgccctcttgcacacattttgcctccatcaagatgtcataaaactcgcctgtgctgatatcacgtttaatcacatatatccaattattcagacttctttgactgtctttttagatgctctaatcatcatcttttcttatatactaatcctcaagacagtgatgggcattgcgtctggacaagaggaagctaaatctctcaacacttgtgtctcccatattagctgtgtcctagtatttcacatcactgtgatgggactgtcattcattcacaggtttgggaaacatgcacctcatgtggtccccattaccatgagctatgtccattttctctttcctccattcgtgaatcctatcatttatagcatcaagaccaagcagattcaaagaagcattattcgcctattttctgggcagagtagggcttgagcccttatttcagaatctcaagatctctaggatttctgggcctctcccattactgaaaaggaaccctggttttatatccacacttttttttcctcagagttagattcaattttaattatcacatgaaaaagctgatgtgagcgagaaatttttatacatatgtgtgtgtgtgtgtgtatatatatatatatatatatatcacctaataaagagggaatgccagtgatgctgaagaaaaagaatacaggaagcagaggagatataacaatccaaaagaagagtaactatgatttcagaaatagtcaagataagtggactaaagcagcttgggtcaaatacagttcatctaaagaaaaatgtgcagttggaggtacattttatgtgtcttataaaggtgaatttgaataatacatgatcatattttcatctccatactttgaaactagttactctgaaaaggatcttgcttgattagtaagcaaacttgtgtgaggctaaacagcaaatatctagaactttaggaagcttactcatgaaatgtaatttcccttagtagactggcatattttactactaaaaggcgtgtgatacagactaacagctaaatagcagcaaacacatttcttatcatctcgtggaagccagatatcccagccccgttttccttcttcccattgtctgctgaaactaacttaatactttttcttctttccagctttctattttgtctcctgacatttttcttctgaaaaaaataaccaactataaatttagatatcaccacccatttctatttcccctcttgcttctcacataaaaaatctcgagactttttcacttcatgaaatagttttgataattaatgcaaaaacttggcaaaggtaatgttatattttagaaatttttcactgatggaatagtttcttccttcaatcttcttcaaagtgtttgtaagtctttatgctgttcattgggtctgaaccgcagtctaccacttgctattagtgtaacaggggatgacaatttcttcatctactgctagttctgcgctagtatttgcagctgatctccttataggaaactaatctcaaaagttgcattcattcctctctgaagactgctgtttcttccaatttttaagttctcgttgagcttgcttctaatattttcttttctgattgaaagtccatgttcagaacccagtatataattattccattctaaattctctctgcttcacttaagaaatctttcatatttattttacatctggacagtgagcactctgaaaatattccagagatttgataagaaaatacttactgaaaactaaagctaaataatgcagtatttctccaaattagaaggcccatttggatgcaggaaaaataaaaactaataaatgactactcctgaaggattcagttattgtgcgaattgtttgtgagagttctttgaaagtaggacgtggggggtttattcattgtcattttagttgttattctctgtgtaaaatttatttatttgtttttccaaagttggcatacagagtttattctatttagaaacgtcgttttctggttgcctttgttgtttggtctaaaatgcacattgtgctaacatacaaactacatttaggaaagctgcatctctattgaccactgaaaggatgtctgtaagagtaaaaaacatagcggtattaaaattttcaggcgaataagggttttttgtaaaaatggcaaatgtatttgtcagtaggggattgcgatgctgttttcttgattgttataagaagacagcctacaacaatgtgtaaatgtgtaatgcaaacttaggggcgatgtgctgaaaataaggtatgatagcgaagtctaagaaacagaggtatctaattataaataagaagaagtgggaagatcaagttgagagctcaagtttactcatatgttagcaagggatgacataatatgatattatagcctattgatctttaaacagcctgtatcaatagtcaaaaatcaattaaaaaggataaattttaaaaatcactcattttcttaagtaaatgtatatttatgcgttttaattttaattatattcataacctatatattatattttacaacttcttagtttgaaaatcctttcaattattaagtcagcatccacctgctgatccagtgatatataaggacatttattgcaccactgaagtaaaatcagtgtcctttcaaacaagtgcagcttccagacaagtctcttagacctcatcctcagtctcaccctgactgacaagtttgccatacttgagaaccttgtgaagcaggcgttgtgtctataagctctcttagagatctgctctgaggaattatcaagtcagcacagttaattctctgtcatactgtgagtttagtcagggcagtaattatatttccccatcagcatattgtcttcccaaggataactacctgccattctgtaaacccccaaatttattaatgcagtcctttaaaaatacacaatgttacttgtctggtgtggctaaagcttatttatttatttatttatttatttttatagacatgatcttgctctgttgcccaggctggagtgcagtggtgccatcacagctcactgcagccttgaaatcctgggctcaagcaatccttcttcctcagctttttgagtacctaggactacaggtttatgccactgcacctagctaatgtttttattttttgtaaatatgggatcatgttatgttgccgaggctgctctccaattcctaacctcaagcaatcctcccaccctggcctcctaatgatagggacaggaggcagagaaattttaggcagaaaagggcggggtccctggcatgggtcctaccctgaagcctggaacatggccattcctgagatatttctctcagccagaactgtttcacattcacattttaagtgccaggtctttctatctttctagctgtcttattcatgcactttctagaaatcacttgtatattaacatgcctatattatatttacattcccttcatttctttattctctgtttgtctcatgaatattccctcaggaaacaccctcccacgccgttccctttatctagcttcttattcattcctcttgctgtactgattagccttgactcctcttatagctcaccccagcctcttggcattattatcaagtgttaccacagttgaacagctggatccaaaagtattgaccaataaggaacagaaaataaaacttgcaatgtaaattataatatggataagcattggtactaaacctgaagttagtattttactctatacctacaaggaagatatacaagtatttctctaaggtagtttgaaaagcctagatatagaaactggatcctcacatgagttcagtatataattgtaacagaataaaaaatcaattatgtattcaagttgctagtgtcttaagaggttcacatttttatctaactgattatcacaaaaatacttcgagttacttttcattataattcctgactacacatgaagagactgacacgtaggtgccttacttaggtaggttaagtaatttatccaaaaccacacaatgtagaacctaagctgattcggccatagaaacacaatatgtggtataaatgagacagagggatttctctccttcctatgctgtcagatgaatactgagatagaatatttagttcatctatcacacattaaacgggactttacatttctgtctgttgaagatttgggtgtggggataactcaaggtatcatatccaagggatggatgaaggcaggtgactctaacagaaagggaaaggatgttggcaaggctatgttcatgaaagtatatgtaaaatccacattaagcttctttctgcatgcattggcaatgtttatgaataatgtgtatgtaaaagtgtgctgtatattcaaaagtgtttcatgtgcctaggggtgtcaaatactttgagtttgtaagtatatacttctctgtaatgtgtctgaatatctctatttacttgattctcaataagtaggtatcatagtgaacatctgacaaatgtttgaggaacaatttagtgtttacctattcaccaaaatttattaaatgcctaatctgtatcagatatacaattatctggcgaaatctgtaattcctaatttaaacagctgtgtagcctaattagggataaaggcatgcaaacccataatttgtgtaggttgaaatgagctatagaaaaatgcagtatatttatcagaagtctttagggtcatgaaaaggaatggtcaactgacactgccagggactcatatgtaagagataactaatgtgaagtgactttaaaggagaaattagcagaagttttctttccatgtctcctcatcatgttacaataacggaagagattaaaacaacaaatacatttagacagcaatgtttatcctggttagatgttttaatctaaatctatcttggagtgttaaaatgcatttgctcacctactttaaaatataaatgaaggtaggaacctgtagatacaaaaagttggagaaaaaaagacaataaagatgacaaaaatctattaatccttgatagaaaatgagaagagataaaacactggtttacataaagaaaataagatggatagatagcagatccttataaaagtgataatttgagaaaaaaaatactccatattctgagtttcttcacataaaataatacaaatctgctgtggtaagttacaaagagatagattttttatcattatataaaagatattttaaacagagttatacaacaaaggaacagactatgtcatatattctcacttatcactataaacatctcagaaaaatctgcaaaatcatttcatagcattttaaatagttaggaataatgtagaaaactgaaacagttctaagtttcccacaaacttagagtctcaaatgttgcattacctaacttacctgcaaatattttatacaaatttgcacatgctactctagtcaaaaatatatgtacattatgggtattttctgtgtgtaacttggttctagttgcttctttcagaaatagcctctatttttgatttacctgataaaatcacattcctctccaaagccttctaaatacttccagactaactactttttagtacatctaagaagaaaagagttttgtctcttatccacctctgagtcaaaaagcagcatgtccatcaattggtacatagttcccacagccccacttagctctggattggagttctacttggcattgtttgcaactacatggacgtaaaatgcatggattctcttgaaaaaatgtttctgccatgatgttctctgaaagagactaaccttccctcgctttgcagagaaagactcgtgtaatccttgacaatgtcatctcatctatttattcccatgtctacccatatgtgaccttcatgtctttgctctaagcccctacatcctcaatctacacactaggatagtataaaagtaatagtaataatagtagtaatagtaataacaatacaatgattatggcttatactatacacaagacactgttgatatattatttcatttagtattcacagtaactctgtgcctcaagtactattgtaataccctttaagaggaggaaactgaggcacagggccctaaagtaatattccaagatgaagtggctactaactgacagagggcataattcaactcatgatatttggctctagaatacatgctctgaatcattatacaataataattcatgaggaaacattttttaaagcctaagttatttgctctgaaataagacataatttggggtgagaaagcttagattccatgaagtattacagcatttggtagtctttttgcactccaggtcttatttttactgcttaaacataataaaacatatggttcagtatgcctttgattttacaataatattcctgttatttttggaagcacagggtgtgggataatgctaattactagtgattagtattgagaggtgacagcgtgctggcagtcctcacagccctcgctcgctcttggcgcctcctctgcctgggctcccacattggtggcacttgaggagcccttcagccggccgctgcactgtgggagcccttttctgggctggccaaggccagagccggctccctcagcttgccaggaggtgtggagggacagacgcgggcaggaaccgggctgtgcgccgtgcttgagggagttccgggtgggcatgggctccgaggaccccgcactcggagccgccagccggccccaccggccgcgggcagtgaggggcttagcacctgggccagcagctgctgtgctcaattcctcgccgggccttagctgccttcctgcggggcagggctcgggacctgcagcgcgccatgcctgagcctccccaccttcatgggctcctgtgcggcccgagcctcgccgacgagcgccgccccctgctccagggcacccagtcccatcgaccacccaagggctgaagagtgcgggcgcacggcaggggactggcaggcagctccccctgcagcccaggtgcgggatccactgggtgaagccggctaggctcctgagtttgctggggatgcgaagaacccttatgtctagataagggattgtaaatacaccaattggcactctgtatctagctcaaggtttgtaaacacaccaatcagcaccctgtgtctagctcagggtttgtgaatgcaccaatcaacactctatctagctactctggtggggccttggagaacctttatgtctagctcagggattgtaaatacaccaatcggcagtctgtatctagctcaaggtttgtaaacacaccaatcagcaccctgtgtctagctcagggtttgtgaatgcaccaatcaacactctgtatctagctactctggtggggacgtggagaacctttatgtctagctcagggattgtaaatacaccactcggcagtctgtatctagctcaaggtttgtaaacacaccaatcagcaccctgtgtctagctcagggtttgtgaatgcaccaatcaacactctgtatctagctactctggtggggacttggagaacctttgtgtggacactctgtatctagctaatctggtggggacgtggagaacctttgtgtctagctcatggattgtaaatgcaccaatcagtgccctgtcaaaacagaccactgggctctaccaatcagcaggatgtgggtggggccagataagagaataaaagcaggctgcccgagccagcagtggcaacccgctcgggtccccttccacactgtggaagctttgttctttcgctctttgcaataaatcttgctgctgctcactgtttgggtctacactgcctttatgagctgtaacgctcaccgcgaaggtctgcagcttcactcttgaagccagcgagaccacgaacccaccgggaggaacgaacaactccagaggcgccgccttaagagctggaacgttcactgtgaaggtctgcagcttcactcctgagccagcgagaccacgaacccatcagaaggaagaaactccgaacacatccaaacatcagaacgaacaaactccacacacgcagcctttaagaactgtaacactcaccacgagggtccccggcttcattcttgaagtcagtgaaaccaagaacccaccaattccggacacagtatgtcagaaacaatatgagtcactaaatcaatatacttctcaacaatttccaacagcccttgcaattaacttggccatgtgactggttgtgactaaaataatgtggagataataatgtgttactccctaaggcagagtgcccttctatcattctctttcccttcctctatgtggcagaaagtaaaagattctgaaatgataaagtcaatcacaggaaggcacctggactcctggcccactgcttggaggagagcactcaggaccatgaacatctgactgtgacgtagcaataaagaaacccacgtttcatatgaaactgcttaaaattaatggcacaagtcatgtttttgatgttgcacatttgtctttatttgtggcttgttttgcttccacatcaatccactcaaggcctacattctgctataatgcaatttcaagttctttacaggccgagaaaaatgaatctgaattcctgacctccaaaagtgatcaagatatttttagttcaggctccaaaattttctcattttcataggttttcctcgattgatcattattcatgatttgcaaggaatcattcaatgttttctaaatctattactgcatcctgacacatatgacattttaactatgttccagatttttgaatgaagagtgtaaattttaaatgttttcaccacaaaaaataagtatgtgaagtggtggatttgttaattagccttatttaaccatttaatattgtacacgtacaccaaagcatcatgttgtaccccatgaatacacacaattattatttgtcaatttaaaatgaaataataaaaaataacaaaggcattagcctctgcattgcctttaccggtcatcctcacggtgactaacgcaaaaaacgttctatttcatccttacaaacatccctatctttgatgcctctttgtctagatctctatcccctcctgttttctctacgttatttatatgggtatcatcaccatcctggacaacatcaggacagatatccctcaccaagccaatgttcctctctatgttggctcaaatgtccttgaactttcctttcaccaccctttccacagtcaaaaggatattgtagtttaatgcctcagagttcagcttttaagcttctgacaaattattcttcctctttaggttctcctttatggaatcttctgtactgatggccatgtcctttaactactatgtagatatctgctactacctgtattatgcctctacctttattagcagagttatctgtactgttggcatgacaatcatttgttaatatgacttgcctttcctttttctgctattcttgatcaaatggctcctctttcttgctcctctcatttctcctgccttcacttggacgtgcttcacgtagtctgtgcttatgactggattaaaaattgatatggacttatcctaatgttgttcgtcataatatgggttttatggtccattattatttcctatgcattgatctggagaaggcttcaatccttttactctttgtggaaaatatctgtaaaccttctggttcactctgctatagcaatttcagtttaggctagtaagcatgaggatgcctccttctctgatttttcccacagtctgttggtcacagaataacctgagtgattactgatgaaagagtgagaatgttattgatagtcacaatgacaaaaaacaaacaactacagtcaaaatgtttctctttttattagtggattatatttcctgacctatatctggcaggactctttagagaggtagctgaagctgctgttatgaccactagagggaagaagatacctgtggagctaatggtccaagatggtggagccccaagcaaggaagttgttaaggagcccttttgattgaaggtgggtgcccccaccttacagggacaggacatctggatactcctcccagtttctccagtttccctttttcctaatatatctcctgataaaatgtctatactcacttccccatttctaataataaagcaaaggctagttagtaagacatcaccttgcattttgaaaatgccatagactttcaaaattatttcatacatcggtctttctttatttcaagagtccagaaatggcaacattacctttgattcaatgtaatggaaagagctctttcaagagacagagaaaagaataatttaatttctttccccacacctccttccctgtctcttaccctatcttccttccttctaccctccccatttctctctctcatttctcagaagtatattttgaaaggattcatagcagacagctaaggctggttttttctaagtgaagaagtgatattgagaaggtagggttgcatgagccctttcagttttttagtttatatacatctgtattgttagaatgttttataatataaataaaattatttctcagttatatactagctatgtaacctgtggatatttccttaagtattacaagctatacttaactcacttggaaaactcaaataaatacctgcttcatagttattaataaggattaagtgagataatgcccataagattcctattaataacagataaatacatacacacacacacacattgaaaggattcttactttgtgctaggaactataataagttcattgatgcattatatcattaagttctaatttcaacactagaaggcaggtattatctaaatttcatactggatacctccaaactcataaagataattaaattgccttttgtcatatatttattcaaaagggtaaactcaaactatggcttgtctaattttatatatcaccctactgaacatgaccctattgtgatattttataaaattattctcaagttattatgaggatgttgaaagacagagaggatggggtgctatgccccaaatcagcctcacaattaagctaagcagctaagagtcttgcagggtagtgtagggaccacagggttaagggggcagtagaattatactcccactttagtttcatttcaaacaatccatacacacacagccctgagcacttacaaattatactacgctctatactttttgtttaaatgtataaataagtggatgaaagaatagatagatagatagacagatagatgatagatagaataaatgcttgccttcatagctgtctccctaccttgttcaaaatgttcctgtccagaccaaagtaccttgccttcacttaagtaatcaattcctaggttatattctgatgtcaaaggaagtcaaaagatgtgaaaaacaatttctgacccacaactcatgctttgtagatgactagatcaaaaaatttcagccatatcttaacagtgagtgaacaggaaatctcctcttttccctacatctgagatcccagcttctaagaccttcaattctcactcttgatgcaacagaccttggaagcatacaggagagctgaacttggtcaacaaaggagaaaagtttgttggcctccaaaggcacagctcaaacttttcaagccttctctaatcttaaaggtaaacaagggtctcatttctttgagaacttcagggaaaatagacaaggacttgcctggtgcttttggtaggggagcttgcactttccccctttctggaggaaatatttatccccaggtagttccctttttgcaccagtggttctttgaagagacttccacctgggaacagttaaacagcaactacagggccttgaactgcacactttcagtccggtcctcacagttgaaaagacctaagcttgtgcctgatttaagcctttttggtcataaaacattgaattctaatctccctctcaaccctacagtcacccatttggtatattaaagatgtgttgtctactgtctagtatccctcaagtagtgtcaggaattagtcatttaaatagtctgcaagccaggagtggtggctcatgtctgtaattccagcacttgagaggtagaagtgggaggactgcttgagctcaagagtttgatattatcctggacaacatagcaagacctcgtctctacttaaaaaaaaaaaaaaaattagccaggcatgtgatgtacacctgtagtcccagctactcaggaggccgaaatgggaggatcccttgagctcaggaggtcaaggctgcagtgagacatgatcttgccactgcactccagcctggacagcagagtgaaaccttgcctcacgaaacagaatacaaaaacaaacaaacaaaaaactgctccgcaatgcgcttccttgatgctctaccacataggtctgggtactttgtacacattatctcattgctgttcataattgttagattaattttgtaatattgatattattcctagaaagctgaggcctcaagatgataacttttattttctggacttgtaatagctttctcttgtattcaccatgttgtaactttcttagagtagtaacaatataaagttattgtgagtttttgcaaacacagcaaacacaacgacccatatagacattgatgtgaaattgtctattgtcaatttatgggaaaacaagtatgtactttttctactaagccattgaaacaggaataacagaacaagattgaaagaatacattttccgaaattacttgagtattatacaaagacaagcacgtggacctgggaggagggttattgtccatgactggtgtgtggagacaaatgcaggtttataatagatgggatggcatctagcgcaatgactttgccatcacttttagagagctcttggggaccccagtacacaagaggggacgcagggtatatgtagacatctcattctttttcttagtgtgagaataagaatagccatgacctgagtttatagacaatgagcccttttctctctcccactcagcagctatgagatggcttgccctgcctctctactaggctgactcactccaaggcccagcaatgggcagggctctgtcagggctttgatagcactatctgcagagccagggccgagaaggggtggactccagagactctccctcccattcccgagcagggtttgcttatttatgcatttaaatgatatatttattttaaaagaaataacaggagactgcccagccctggctgtgacatggaaactatgtagaatattttgggttccatttttttttccttctttcagttagaggaaaaggggctcactgcacatacactagacagaaagtcaggagctttgaatccaagcctgatcatttccatgtcatactgagaaagtccccacccttctctgagcctcagtttctctttttataagtaggagtctggagtaaatgatttccaatggctctcatttcaatacaaaatttccgtttattaaatgcatgagcttctgttactccaagactgagaaggaaattgaacctgagactcattgactggcaagatgtccccagaggctctcattcagcaataaaattctcaccttcacccaggcccactgagtgtcagatttgcatgcactagttcacgtgtgtaaaaaggaggatgcttctttcctttgtattctcacatacctttaggaaagaacttagcacccttcccacacagccatcccaataactcatttcagtgactcaacccttgactttataaaagtcttgggcagtatagagcagagattaagagtacagatgctggagccagaccacctgagtgattagtgactcagtttctcttagtagttgtatgactcagtttcttcatctgtaaaatggagggttttttaattagtttgtttttgagaaagggtctcactctgtcacccaaatgggagtgtagtggcaaaatctcggctcactgcaacttgcacttcccaggctcaagcggtcctcccacctcaacatcctgagtagctggaaccacaggtacacaccaccatacctcgctaattttttgtatttttggtagagatggggtttcacatgttacacaggatggtctcagactccggagctcaagcaatctgcccacctcagccttccaaagtgctgggattataagcatgattacaggagttttaacaggctcataagattgttctgcagcccgagtgagttaatacatgcaaagagtttaaagcagtgacttataaatgctaactactctagaaatgtttgctagtattttttgtttaactgcaatcattcttgctgcaggtgaaaactagtgttctgtactttatgcccattcatctttaactgtaataataaaaataactgacatttattgaaggctatcagagactgtaattagtgctttgcataattaatcatatttaatactcttggattctttcaggtagatactattattatccccattttactacagttaaaaaaactacctctcaacttgctcaagcatacactctcacacacacaaacataaactactagcaaatagtagaattgagatttggtcctaattatgtctttgctcactatccaataaatatttattgacatgtacttcttggcagtctgtatgctggatgctggggatacaaagatgtttaaatttaagctccagtctctgcttccaaaggcctcccaggccaagttatccattcagaaagcattttttactctttgcattccactgtttttcctaagtgactaaaaaattacactttattcgtctgtgtcctgctctgggatgatagtctgactttcctaacctgagcctaacatccctgacatcaggaaagactacaccatgtggagaaggggtggtggttttgattgctgctgtcttcagttagatggttaactttgtgaagttgaaaactgtggctctctggttgactgttagagttctggcacttgtcactatgcctattatttaacaaatgcatgaatgcttcagaatatgggaatattatcttctggaatagggaatcaagttatattatgtaacccaggattagaagattcttctgtgtgtaagaatttcataaacattaagctgtctagcaaaagcaagggcttggaaaatctgtgagctcctcaccatatagaaagcttttaacccatcattgaataaatccctataggggatttctaccctgagcaaaaggctggtcttgattaattcccaaactcatatagctctgagaaagtctatgctgttaacgttttcttgtctgctaccccatcatatgcacaacaataaatgcaggcctaggcatgactgaaggctctctcataattcttggttgcatgaatcagattatcaacagaaatgttgagacaaactatggggaagcagggtatgaaagagctctgaatgaaatggaaaccgcaatgcttcctgcccattcagggctccagcatgtagaaatctggggctttgtgaagactggcttaaaatcagaagccccattggataagagtagggaagaacctagagcctacgctgagcaggtttccttcatgtgacagggagcctcctgccccgaacttccagggatcctctcttaagtgtttcctgctggaatctcctcacttctatctggaaatggtttctccacagtccagcccctggctagttgaaagagttacccatgcagaggccctcctagcatccagagactagtgcttagattcctactttcagcgttggacaacctggatccacttgcccagtgttcttccttagttcctaccttcgaccttgatcctcctttatcttcctgaaccctgctgagatgatctatgtggggagaatggcttctttgagaaacatcttcttcgttagtggcctgcccctcattcccactttaatatccagaatcactataagaagaatataataagaggaataactcttattataggtaagggaaaattaagaggcatacgtgatgggatgagtaagagaggagagggaaggattaatggacgataaaatctactactatttgttgagaccttttatagtctaatcaattttgctattgttttccatcctcacgctaactccataaaaaaacactattattatctttattttgccatgacaagactgagctcagaagagtcaagcatttgcctaaggtcggacatgtcagaggcagtgccagacctatgtgagactctgcagctactgctcatgggccctgtgctgcactgatgaggaggatcagatggatggggcaatgaagcaaaggaatcattctgtggataaaggagacagccatgaagaagtctatgactgtaaatttgggagcaggagtctctaaggacttggatttcaaggaattttgactcagcaaacacaagaccctcacggtgactttgcgagctggtgtgccagatgtgtctatcagaggttccagggagggtggggtggggtcagggctggccaccagctatcagggcccagatgggttataggctggcaggctcagataggtggttaggtcaggttggtggtgctgggtggagtccatgactcccaggagccaggagagatagaccatgagtagagggcagacatgggaaaggtgggggaggcacagcatagcagcatttttcattctactactacatgggactgctcccctatacccccagctaggggcaagtgccttgactcctatgttttcaggatcatcatctataaagtaagagtaataattgtgtctatctcatagggttattatgaggatcaaaggagatgcacactctctggaccagtggcctaacagttcaggacagagctatgggcttcctatgtatgggtcagtggtctcaatgtagcaggcaagttccagaagatagcatcaaccactgttagagatatactgccagtctcagagcctgatgttaatttagcaatgggctgggaccctcctccagtagaaccttctaaccagctgctgcagtcaaagtcgaatgcagctggttagactttttttaatgaaagcttagctttcattaaagattaagctcctaagcagggcacagatgaaattgtctaacagcaactttgccatctaaaaaaatctgacttcactggaaacatggaagcccaaggttctgaacatgagaaatttttaggaatctgcacaggagttgagagggaaacaagatggtgaagggactagaaaccacatgagagacacgaggaaatagtgtagatttaggctggaggtaaatgaaagagaagtgggaattaatacttactgaaatctttctatatgtcaggtgccattttatgatatttaataatctcattacatatggtaattctgtgagatatgtattattgaacatactataattaatactaatgataagtaacacctcttgagtacttagtatatgctagaatcaaatttaagtttatcatatgaggccgggcacggtggctcatatatgggattacatgcctgtaatcccagcactttgggaggccaaggcaattggatcacctgaggtcaggagttccagaccagcctggccaacatggtgaaaccccttctctactaaaaaatacaaaaaatcagccaggtgtggtggcacgcgtctataatcccagctactcaggaggctgaggcaggagaatcacttgaacccaggaggtggaggttgcagtgagctaagattgcaccactgcactccagcctaggcgacagagtgagactccatctcaaaaaaaaaaaaagaagtttattatatgaattaacttagttttactcacaccaatactcagaagtagattattacctcatttattgatgaggagcccaatgtacttgtagtgtagatcaacttattgaaagcacaagctaataagtagacaattagtaattagaagtcagatggtctgagctctcctactgtctacattacatgagctcttattaactggggactcgaaaatcaaagacatgaaataatttgtccaagcttacagaaccaccaagtagtaaggctaggatgtagacccagttctgctacctctgaagacagtgttttttccacagcaaaacacaaactcagatattgtggatgcgagaaattagaagtagatattcctgccctgtggcccttgcttcttacttttacttcttgtcgattggaagttgtggtccaagccacagttgcagaccatacttcctcaaccataattgcatttcttcaggaaagtttgagggagaaaaaggtaaagaaaaatttagaaacaacttcagaataaagagattttctcttgggttacagagattgtcatatgacaaattataagcagacacttgagaaaactgaaggcccatgcctgcccaaattaccctttgaccccttggtcaagctgcaactttggttaaagggagtgtttatgtgttatagtgttcatttactcttctggtctaacccattggctccgtcttcatcctgcagtgacctcagtgcctcagaaacatacatatgtttgtctagtttaagtttgtgtgaaattctaactagcgtcaagaactgagggccctaaactatgctaggaatagtgctgtggtgctgtgataggtacacaagaaatgagaagaaactgcagattctctgcatctccctttgccgggtctgacaacaaagtttccccaaattttaccaatgcaagccatttctccatatgctaactactttaaaatcatttggggcttcacattgtctttctcatctgtaaaaagaatggaagaactcattcctacagaactccctatgtcttccctgatgggctagagttcctctttctcaaaaattagccattattgtatttccttctaagccaaagctcagaggtcttgtattgcccagtgacatgcacactggtcaaaagtaggctaagtagaagggtactttcacaggaacagagagcaaaagaggtgggtgaatgagagggtaagtgagaaaagacaaatgagaagttacaacatgatggcttgttgtctaaatatctcctagggaattattgtgagaggtctgaatagtgttgtaaaataagctgaatctgctgccaacattaacagtcaagaaatacctccgaataactgtacctccaattattctttaaggtagcatgcaactgtaatagttgcatgtatatatttatcataatactgtaacagaaaacacttactgaatatatactgtgtccctagttctttacacaataaactaatctcatcctcataattctattagctaatacatattatcatcctatatttcagagacttcaagaagttaagcaacttgctcaagatcatctaagaagtaggtggtatttctgggctcatttggcccctcctaatctctcatggcaacatggctgcctaaagtgttgattgccttaattcatcagggatgggctcatactcactgcagaccttaactggcatcctcttttcttatgtgatctgcctgaccctagtagacttatgaaatttctgatgagaaaggagagaggagaaaggcagagctgactgtgatgagtgatgaaggtgccttctcatctgggtaccagtggggcctctaagactaagtcactctgtctcactgtgtcttagccagttccttacagcttgccctgatgggagatagagaatgggtatcctccaacaaaaaaataaattttcatttctcaaggtccaacttatgttttcttaatttttaaaaaaatcttgaccattctccactctctaaaataatccacagtgagagaaacattcttttcccccatcccataaatacctctattaaatatggaaaatctgggcatggtgtctcacacctgtaatcccagcactttgggaggctgaggtgggtggactgcttggagctcaggagttcaagaccatcttggacaacatggtgataccctgcctctacaaaaagtacaaaaattagcctggcatggtggtgtgcacctgtaatcccagctattagggtggctgaggcaggagaattgcttgaacccgggaggcggaggttgcagtgagctgagatcgtgccactgcactccagcctgggggacagagcacattataattaactgttattttttacttggactcttgtggggaataagatacatgttttattcttatttatgattcaagcactgaaaatagtgtttagcatccagcaggtgcttcaaaaccatttgctgaatgattactatactttttacaagctcagctccctctatcccttccagcatcctcatctctgattaaataagcttcagtttttccttagttcctgttacatttctgtgtgtctccattagtgacctcccatagtccaagcatgagcagttctggccaggcccctgtcggggtcagtgccccacccccgccttctggttctgtgtaaccttctaagcaaaccttctggctcaagcacagcaatgctgagtcatgatgagtcatgctgaggcttagggtgtgtgcccagatgttctcagcctagagtgatgactcctatctgggtccccagcaggatgcttacagggcagatggcaaaaaaaaggagaagctgaccacctgactaaaactccacctcaaacggcatcataaagaaaatggatgcctgagacagaatgtgacatattctagaatatattatttcctgaatatatatatatatatacacatatacgtatatatatatatatatatatatttgttgttatcaattgccatagaatgattagttattgtgaatcaaatatttatcttgcaggtggcctctatacctagaagcggcagaatcaggctttattaatacatgtgtatagatttttaggatctatacacatgtattaatatgaaacaaggatatggaagaggaaggcatgaaaacaggaaaagaaaacaaaccttgtttgccattttaaggcacccctggacagctaggtggcaaaaggcctgtgctgttagaggacacatgctcacatacggggtcagatctgacttggggtgctactgggaagctctcatcttaaggatacatctcaggccagtcttggtgcattaggaagatgtaggcaactctgatcctgagaggaaagaaacattcctccaggagagctaaaagggttcacctgtgtgggtaactgtgaaggactacaagaggatgaaaaacaatgacagacagacataatgcttgtgggagaaaaaacaggaggtcaaggggatagagaaggcttccagaagaatggctttgaagctggcttctgtaggagttcacagtggcaaagatgtttcagaaatgtgacatgacttaaggaactatacaaaaaggaacaaatttaaggagaggcagataaattagttcaacagacatgcaaggaattttcagatgaatgttatgtctccactgagcttcttgaggttagcagctgtgagggttttgcaggcccaggacccattacaggacctcacgtatacttgacactgttttttgtattcatttgtgaatgaatgacctcttgtcagtctactcggtttcgctgtgaatgaatgatgtcttgtcagcctacttggtttcgctaagagcacagagagaagatttagtgatgctatgtaaaaacttcctttttggttcaagtgtatgtttgtgatagaaatgaagacaggctacatgatgcatatctaacataaacacaaacattaagaaaggaaatcaacctgaagagtatttatacagataacaaaatacagagagtgagttaaatgtgtaataactgtggcacaggctggaatatgagccatttaaatcacaaattaattagaaaaaaaacagtggggaaaaaattccatggatgggtctagaaagactagcattgttttaggttgagtggcagtgtttaaagggtgatatcagactaaacttgaaatatgtggctaaataactagaatactctttattttttcgtatcatgaatagcagatatagcttgatggccccatgcttggtttaacatccttgctgttcctgacatgaaatccttaatttttgacaaaggggctattcattttcattttatattgggcctagaaattatgtagatggtcctgaggaaaagtttatagcttgtctatttctctctctaacatagttgtcagcacaatgcctaggctataggaagtactcaaagcttgttaaattgaattctatccttcttattcaattctacacatggaggaaaaactcatcagggatggaggcacgcctctaaggaaggcaggtgtggctctgcagtgtgattgggtacttgcaggacgaagggtggggtgggagtggctaaccttccattcctagtgcagaggtcacagcctaaacatcaaattccttgaggtgcggtggctcactcctgtaatcacagcagtttgggacgccaaggtgggcagatcacttgaggtcaggagttggacaccagcccagccaacatagtgaaacctggtctctgcttaaaaatataaaaattagctggacgtggtgacgggagcctgtaatccaactacttgggaggctgaggcaggagaatcgcttgaaccggggaggtggagtttgcactgagcagagatcatgccattgcactccagcctccagagcgagactctgtctaaagaaaaacgaaaacaaacaaacaaacaaacaaacaaaacccatcaaattccctgaccgaacagaattctgtctgattgttctctgacttatctaccattttccctccttaaagaaactgtgaacttccttcagctagaggggcctggctcagaagcctctggtcagcatccaagaaatacttgatgtcactttggctaaaggtatgatgtgtagacaagctccagagatggtttctcatttccatatccacccacccagctttccaattttaaagccaattctgaggtagagactgtgatgaacaaacaccttgacaaaattcaacccaaagactcactttgcctagcttcaaaatccttactctgacatatactcacagccagaaattagcatgcactagagtgtgcatgagtgcaacacacacacacaccaattccatattctctgtcagaaaatcctgttggtttttcgtgaaaggatgttttcagaggctgaccccttgccttcacctccaatgctaccactctggtctaagtcactgtcaccaccacctaaattatagctgttgactcataacaatcttcctgcttctaccactgccccactacaatttcttcccaatatactatccaaattagtcttttcaaaatgtaagtcatatatggtcacctctttgttcaaagtcttctgatagtttcctatatcatttataataaaaccaaatccttacaattctctacaatagttgttcatgcatatattatgtttattacagatacatatatatagctctcatataaataaatatatatatttatgtgtatgtgtgtagagtgttttttcttacaactctatgatgtaggtattattagtgtcccaaattttataatttaggacttctatgatctcatcttttattctccccttcaccgaatctcatcctacattggccttattgatattccttgaaaattctaagcatcttacatctttagggtatttacatttgccattccctatgccctaaatatttaatcatagtttcatataaatgggttcctcatcatctatgggtactctctcaggtgttaactttatagtgaggactttcctgccatactacttaaagtagcgataccctttcaccctgtcctaatcacactctggccttcatttcagttttttttttttctccatagcacctaatctcattggtatataacatgtttcatttgcttatttaatgtcaagctctttccactatcaagtccatgaaaacaggaactttattcctctattctgtttttgtgctgtattcttagcaattttacaattttgaatgaatgaatgagcagtcaaacacatatacaactataattaaaaggatgtatgctgacacatccactgctatgcacacacaaagaaatcagtggagtagagctggaagtgctaagcctgcatagagctagttagccctccgcaggcagagccttgatgggattactgagttctagaattggactcatttgttttgtaggctgagatttgctcttgaaaacttgttctgaccaaaataaaaggctcaaaagatgaatatcgaaaccagggtgttttttacactggaatttataactagagcactcatgtttatgtaagcaattaattgtttcatcagtcaggtaaaagtaaagaaaaactgtgccaaggcaggtagcctaatgcaatatgccactaaagtaaacattatttcataggtgtcagatatggcttattcatccatcttcatgggaaggatggccttggcctggacatcagtgttatgtgaggttcaaaacacctctaggctataaggcaacagagctccttttttttttttctgtgctttcctggctgtccaaatctctaatgataagcatacttctattcaatgagaatattctgtaagattatagttaagaattgtgggagccattccgtctcttatagttaaatttgagcttcttttatgatcactgtttttttaatatgctttaagttctggggtacatgtgccatggtggtttgctgcacccatcaacccgtcatctacattaggtatttctcctaatgctatccttcccctagccccccacccccaacaggccccagtgtgtgatgttcccctccctgtgtccatggatcactggtttttttttgttttttttttttttttaaagtctcagttaaatttttggaatgtaatttattttcctggtatcctaggacttgcaagttatctggtcactttagccctcacgttttgatgataatcacatatttgtaaacacaacacacacacacacacacacacacatatatatatatataaaacatatatatacataaacacacataacatatttatcgggcatttctgagcaactaatcatgcaggactctcaaacactaacctatagccttttctatgtatctacttgtgtagaaaccaagcgtggggactgagaaggcaatagcaggagcattctgactctcactgcctttagctaggcccctccctcatcacagctcagcatagtcctgagctcttatctatatccacacacagtttctgacgctgcccagctatcaccatcccaagtctaaagaaaaaaataatgggtttgcccatctctgttgattagaaaacaaaacaaaataaaataagcccctaagctcccagaaaacatgactaaaccagcaagaagaagaaaatacaataggtatatgaggagactggtgacactagtgtctgaatgaggcttgagtacagaaaagaggctctagcagcatagtggtttagaggagatgtttctttccttcacagatgccttagcctcaataagcttgcggttgtggaagtttactttcagaacaaactcctgtggggctagaattattgatggctaaaagaagcccgggggagggaaaaatcattcagcatcctcacccttagtgacacaaaacagagggggcctggttttccatatttcctcatgatggatgatctcgttaatgaaggtggtctgacgagatcattgcttcttccatttaagccttgctcacttgccaatcctcagttttaaccttctccagagaaatacacattttttattcaggaaacatactatgttatagtttcaatactaaataatcaaagtactgaagatagcatgcataggcaagaaaaagtccttagctttatgttgctgttgtttcagaatttaaaaaagatcaccaagtcaaggacttctcagttctagcactagaggtggaatcttagcatataatcagaggtttttcaaaatttctagacataagattcaaagccctgcacttaaaatagtctcatttgaattaactctttatataaattgaaagcacattctgaactacttcagagtattgttttatttctatgttcttagttcataaatacattaggcaatgcaatttaattaaaaaaacccaagaatttcttagaattttaatcatgaaaataaatgaaggcatctttacttactcaaggtcccaaaaggtcaaagaaaccaggaaagtaaagctatatttcagcggaaaatgggatatttatgagttttctaagttgacagactcaagttttaaccttcagtgcccatcatgtaggaaagtgtggcataactggctgattctggctttctactcctttttcccattaaagatccctcctgcttaattaacattcacaagtaactctggttgtactttaggcacagtggctcccgaggtcagtcacacaataggatgtctgtgctccaagttgccagagagagagattactcttgagaatgagcctcagccctggctcaaactcacctgcaaacttcgtgagagatgaggcagaggtacactacgaaagcaacagttagaagctaaatgatgagaacacatggactcatagagggaaacaacgcatactggggcctatcagagggtggagggtgagagaaggagaggatcaggaaaaatcactaatggatgctaagcgtaatacctgagtgatgagatcatctatacaacaaacccccttgacattcatttatctatgtaacaaacctgcacatcctgtacatgtacccctgaacttaaaataaaagttgaaaacaagaaagcaacagtttgaacacttgttatggtctattctctcattctttacaattacactagaaaatagccacaggcttcctgcaaggcagccacagaatttatgacttgtgatatccaagtcattcctggataatgcaaaatctaacacaaaatctagtagaatcatttgcttacatctatttttgttctgagaatatagatttagatacataatggaagcagaataatttaaaatctggctaatttagaatcctaagcagctcttttcctatcagtggtttacaagccttgtttatatttttcctattttaaaaataaaaataaagtaagttatttgtggtaaagaatattcattaaagtatttatttcttagataataccatgaaaaacattcagtgaagtgaagggcctactttacttaacaagaatctaatttatataatttttcatactaatagcatctaagaacagtacaatatttgactcttcaggttaaacatatgtcataaattagccagaaagatttaagaaaatattggatgtttccttgtttaaattaggcatcttacagtttttagaatcctgcatagaacttaagaaattacaaatgctaaagcaaacccaaacaggcaggaattaatcttcatcgaatttgggtgtttctttctaaaagtcctttatacttaaatgtcttaagacatacatagattttattttactaattttaattatatagacaataaatgaatattcttactgattactttttctgactgtctaatctttctgatctatcctggatggccataacacttatctctctgaactttgggcttttaatataggaaagaaaagcaataatccatttttcatggtatctcatatgataaacaaataaaatgcttaaaaatgagcaggtgaagcaatttatcttgaaccaacaagcatcgaagcaataatgagactgcccgcagcctacctgacttctgagtcaggatttataagccttgttactgagacacaaacctgggcctttcaatgctataacctttcttgaagctcctccctaccacctttagccataaggaaacatggaatgggtcagatccctggatgcaagccaggtctggaaccataggcagtaaggagagaagaaaatgtgggctctgcaactggctccgagggagcaggagaggatcaaccccatactctgaatctaagagaagactggtgtccatactctgaatgggaagaatgatgggattacccatagggcttgttttagggagaaacctgttctccaaactcttggccttgagatacctggtccttattccttggactttggcaatgtctgaccctcacattcaagttctgaggaagggccactgccttcatactgtggatctgtagcaaattccccctgaaaacccagagctgtatcttaattggttaaaaaaaattatattatctcaacgactgttcttctctgagtagccaagctcagcttggttcaagctacaagcagctgagctgctttttgtctagtcattgttcttttatttcagtggatcaaatacgttctttccaaacctaggatcttgtcttcctaggctatatattttgtcccaggaagtcttaatctggggtccacagaacactagggggctggtgaagtttatagaaaaaaaatctgtatttttacttacatgtaactgaaatttagcattttcttctactttgaatgcaaaggacaaactagaatgacatcatcagtacctattgcatagttataaagagaaaccacagatattttcatactacaccataggtattgcagatctttttgtttttgtttttgtttgagatggagtttcgctcttattgcccaggctggagtgcagtggcatgatttcggctcactgcaacctccccttcctgcattcaagcaattctcctgccttggcctcctgagtagctggggattacaggcacctgccaccatgccagtctaatttttgtatttttagtagagatggggtttcgccatgttggccaggctggtcttgaactcctgacctcagatgatctgcccgccttggcctcctgaagtgctgggattataggtgtgagccaccacgcctggcccattgcagatatttttaattcacatttatctgcatcactacttggatcttaaggtagctgtagacccaatcctagatctaatgctttcataaagaagcaaatataataaatactataccacaaatgtaatgtttgatgtctgataatgatatttcagtgtaattaaacttagcactcctatgtatattatttgatgcaataaaaacatatttttttagcacttacagtctgccaaactggcctgtgacacaaaaaaagtttaggaattcctggttttgtctgtgttagccaatggttagaatatatgctcagaaagataccattggttaatagctaaaagaaaatggagtagaaattcagtggcctggaataataacaatttgggcagtcattaagtcaggtgaagacttctggaatcatgggagaaaagcaagggagacattcttacttgccacaagtgtttttttttttttttttttttatcacaaacataagaaaatataataaataacaaagtcaggttatagaagagagaaacgctcttagtaaacttggaatatggaatccccaaaggcacttgacttgggagacaggagccatactgctaagtgaaaaagacgaagaacctctagggcctgaacatacaggaaattgtaggaacagaaattcctagatctggtggggcaaggggagccataggagaaagaaatggtagaaatggatggagacggaggcagaggtgggcagatcatgaggtcaagagatcgagaccatcctggcaaacatggtgaaatcccgtctctactaaaaataaaaaaattagctgggcatggtggcatgcgcctgtagtcccagctgctcgggaggctgaggcaggagaatcgtttgaacccaggaggcgaaggttgcagtgagctgagatagtgccattgcactccagtctggcaacagagtgagactccgtctcaaaaaaaaaaaaaaaagaaagaaagaaaagaaaaagaaaaaagaaaaaataaatggatgtagaacaagccagaaggaggaactgggctggggcaatgagattatggtgatgtaagggacttttatagaattaacaatgctggaatttgtggaactctgcttctattattcccccaatcattacttctgtcacattgatagttaaataatttctgtgaatttattccttgattctaaaatatgaggataatgacaatggtattataagggcagattaagtgatatagcatgagcaatattcttcaggcacatggatcgaattgaatacactgtaaatcccaacttccagtttcagctctaccaagtaaagagctagcaagtcatcaaaatggggacatacagaaaaaaaaaaggacactagaggaataatataccctgactcctagcctgattaatatatcgattcacttttttctctgtttgatgacaaattctggctttaaataattttaggattttaggcttctcagctcccttcccagtgagaagtataagcaggacagacaggcaagcaagaagagagccccaggcaatactcacaaagtagccaatgtcccctgtggtcatagagaaatgaaaagagagaggattctctggaagcactggatgtaatcttttctgtctgtcctctctagggaatcaccccaaggtactgtactttgggattaaggctttagtcccactgtggactacttgctattctgttcagtttctagaaggaactatgtacggtttttgtctccctagagaaactaaggtacagaagttttgtttacaatgcactccttaagagagctagaactgggtgagattctgttttaacagctttattttcttttccttggccctgtttttgtcactgtcaccacctttaaggcaaatgttaaatgcgctttggctgaaactttttttcctattttgagatttgctcctttatatgaggctttcttggaaaaggagaatgggagagatggatatcattttggaagatgatgaagagggtaaaaaaggggacaaatggaaatttgtgttgcagatagatgaggagccaacaaaaaagagcctcaggatccagcacacattatcacaaacttagtgtccatccatcactgctgaccctctccggacctgactccacccctgagggacacaggtcagccttgaccaatgacttttaagtaccatggagaacagggggccagaacttcggcagtaaagaataaaaggccagacagagaggcagcagcacatatctgcttccgacacagctgcaatcactagcaagctctcaggcctggcatcatggtgcattttactgctgaggagaaggctgccgtcactagcctgtggagcaagatgaatgtggaagaggctggaggtgaagccttgggcaggtaagcattggttctcaatgcatgggaatgaagggtgaatattaccctagcaagttgattgggaaagtcctcaagattttttgcatctctaattttgtatctgatatggtgtcatttcatagactcctcgttgtttacccctggacccagagattttttgacagctttggaaacctgtcgtctccctctgccatcctgggcaaccccaaggtcaaggcccatggcaagaaggtgctgacttcctttggagatgctattaaaaacatggacaacctcaagcccgcctttgctaagctgagtgagctgcactgtgacaagctgcatgtggatcctgagaacttcaaggtgagttcaggtgctggtgatgtgattttttggctttatattttgacattaattgaagctcataatcttattggaaagaccaacaaagatctcagaaatcatgggtcgagcttgatgttagaacagcagacttctagtgagcataaccaaaacttacatgattcagaactagtgacagtaaaggactactaacagcctgaattggcttaacttttcaggaaatcttgccagaacttgatgtgtttatcccagagaattgtattatagaattgtagacttgtgaaagaagaatgaaatttggcttttggtagatgaaagtccatttcaaggaaatagaaatgccttattttatgtgggtcatgataattgaggtttagaaagagatttttgcaaaaaaaataaaagatttgctcaaagaaaaataagacacattttctaaaatatgttaaatttcccatcagtattgtgaccaagtgaaggcttgtttccgaatttgttggggattttaaactcccgctgagaactcttgcagcactcacattctacatttacaaaaattagacaattgcttaaagaaaaacagggagagagggaacccaataatactggtaaaatggggaagggggtgagggtgtaggtaggtagaatgttgaatgtagggctcatagaataaaattgaacctaagctcatctgaattttttgggtgggcacaaaccttggaacagtttgaggtcagggttgtctaggaatgtaggtataaagccgtttttgtttgtttgtttgttttttcatcaagttgttttcggaaacttctactcaacatgcctgtgtgttattttgtcttttgcctaacagctcctgggtaacgtgatggtgattattctggctactcactttggcaaggagttcacccctgaagtgcaggctgcctggcagaagctggtgtctgctgtcgccattgccctggcccataagtaccactgagttctcttccagtttgcaggtgttcctgtgaccctgacaccctccttctgcacatggggactgggcttggccttgagagaaagccttctgtttaataaagtacattttcttcagtaatcaaaaattgcaattttatcttctccatcttttactcttgtgttaaaaggaaaaagtgttcatgggctgagggatggagagaaacataggaagaaccaagagcttccttaagaaatgtatgggggcttgtaaaattaatgtggatgttatgggagaattccaggattccaaggaggatgatatgatggagaaaaatctttatcggggtgggaaaatggttaattaagtggacagagactcctaggcagtttttactgcaccggggaaagaaggagctgttagtggtacctgagaaagcagatttgtggtacatgtcacttttcattaaaaacaaaaacaaaacaaaacaaaacttcatagatatccaagatataggctagaattactattttaatttactcttatttacattttgaagtagctagcttgtcacatgttttatgaaattgatttggagataagatgagtgtgtatcaacaatagcctgctctttccatgaaggattccattatttcatgggttagctgaagctaagacacatgatatcattgtgcattatcttctgatagaatgtaacatgcactaaaataaagttagagttaggacctgagtgggaaagtttttggagagtgtgatgaagactttccgtgggagatagaatactaataaaggcttaaattctaaaaccagcaagctagggcttcgtgacttgcatgaaactggctctctggaagtagaagggagagtaagacatacgtagaggactaggaaagaccagatagtacagggcctggctacaaaaatacaagcttttactatgctattgcaatactaaacgataagcattaggatgttaagtgactcaggaaataagattttgggaaaaagtaatctgcttatgtgcacaaaatggattcaagtttgcagataaaataaaatatggatgatgattcaaggggacagatacaatggttcaaacccaagaggagcagtgagtctgtggaatttgaaggatggacaaaggtggggtgagaaagacatagtattcgactgactgtgggagatgagaaggaagaaggaggtgataaatgactgaaagctcccagactggtgaagataacaggaggaaaccatgcactgacctggtgactctcatgtgtgaagggtagagggatattaacagatttactttttaggaagtgctagattggtcagggagttttgaccttcaggtcttgtgtctttcatatcaaggaacctttgcattttccaagttagagtgccatattttggcaaatataactttattagtaattttatagtgctctcacattgatcagactttttcctgtgaattacttttgaatttggctgtatatatccagaatatgggagagagacaaataattattgtagttgcaggctatcaacaatactggtctctctgagccttataacctttcaatatgcccataaacagagtaaacagggattattcatggcactaaatattttcacctagtcagtcaacaaatgggagcaatgtgcattttttgatacatatttttatatatttatggggtacatgtgatacttacatgcctagaacatgtgatgattaagtctagatatttaggatatccattgctttgagcatttatcatttctatgtattgagaaaatttcaaatcctcatttctagccattttgaaatatataataaatagtaattaactatagtcaccctactcaaatatcaaacattatggcttaatccttctatccaactgtgtttgtacctattaaccaacatctcttaaatcccctcccatacacactcacactttttccagcctctgataactatcattctactctctaccaccatgagacccacttttttagctcccacagatgaataaaaacatgtgatatttgactttctgtatctggcttattttattatctatctctttggcataccaagagtttgtttttgttctgcttcagggctttcaattaacataatgacctctggttccatccatgttgctacaaatgacaagatttcattctttttcatggcaaaatagtactgtgcaaaaatacaattttttaatccgttcatctgttgatagacacttaggttgatcccaaaccttaactattgtgaatagtgcttcaataaacatgagtgtaatgtgtccattggatatactgatttcctttcttttggataaataaccactagtgagattgctggattgtatgatagttctgtttttagtttactgagaaatcttcatactgttttccataatggttgtactattttacattcccaccaacagtgtgtaagaaagagttcccttttctccatatcctcacaaggatctgttattttttgtcttttttgttaatagccgttttaactagagtaagtagatatctcattgtagttttgatttgcatttccctgatcattagtgatgttgagaattttttcatatgtttgttggtcatttgtatatctttttctgagaattgtctgttcatgtccttagcctactttttattgggattgtttgttattttcttgataatctatttgtgttcattttagagcctggatattattcttttgtcagatgtatagattgtgaagattttctcccactctgtgggttgtctgtttattctgcagactcttccttttgccatgcaaaagctctttagtttaatttagtcccagatattttctttgtttttatgtatttgcatttgtgttcttggtcatgaaatcctttcctaagccaatgtgtagaagggtttttccgatgttattttctagaattgttacagtttcagggcttagatttaagtccttgatccatcttgagttgatttttgtataaggtgagagatgaagatccagtttcattctcctacatgtagcttgccagctatccccgcaccatttgttgaatagggtgccctttccccactttatgtttttgtttgctttgtcaaagatcagttggatgtaagtatttgagtttatttctgggttctctattctgttccattggtcgatgtgcctatttgtacaccagcatcatgctgttttggtgactatggccttattgtatagtttgaaatgaggtaatgtaatgccttcagatttgttcttttttttagacttgcttgtttattgggctcttttttggttccataagaattttaggattgttttttctagttctgtgaagactaatggtggtattttgatgggaattgcaatgaatttgtaggttgcttctggcattatggccattttcacaatattgattctacccatctatgagaatggcatgtgtttccatttgtttgtgtcttatatgattactttcagccgtgttttgtagttttccttgtagatgtctttcacctccttggttaggtatatattcctaagtttttgttttgttttgttttgttttttgcagctattgtaaaaggggttgagttcttgattttattctcagcttggtcattgctggtatgtaagaaagcaactcattggtgtacgttaattttgtatccagaaactttgctgaattattttatcagttctagggggttttggaggagtctttagagttttctacatacacaatcatatcatcagcaaacagtgacagtttgactttctctttaacaatttggatgtgctttacttgtttctcttgtctgattgctcttgctaggacttccagtaatatgttaaagagaagtggtgagagtgggtatccttgtctcattccagttttcagacagaatgcttttaactttttcccattcaatataatgttggctgtgtgtttaccatagctggcttttattacattgaggtatgtcctttgtaaaccgattttgctgagttttagtcataaagtgatgttgaattttgttgaatgcagtttctgtggctattgagataatcacatgatttttgtttccaattctctttatgttgtgtatcacacttattgacttgcgtatgttaaaccatccgtgcatccctcgcatgaaacccacttgatcatgggttttgatatgctgtcggatgctattagctagtattttgtcaaggatgttggcatctatgttcatcagggatattgatctgtagtgttttttttttttggttatgttctttcccagttttggtattaaggtgatactggcttcatagaatgatttagggaggattctctctttctctatcttgtagaatactgtcaataggattggtatcaattcttctttgaatgtctggtagaattcagctgtgaatctatctggtcctggacttttttgttgttggtaaatttttattatcatttcagtcttgctgcttattactggtctgttcagggtatctaattcttcctgacttaagctagagccctgtatctttccaggaattcgaacgtctcctttaggttttctagtttatgcatgtaaaggtgttcatagtagccttgaataatcttttgtatttctgtggtatcagtaatagtatctcctgttttgtttctaattgagtttatttgcacttctctcctcttttcttggttaatcttgctaatggtctatcagttttatttatcttttcaaagaaccagctttttatttcatttagcttttgtatttttttgcagttgttttaatttcatttagttctcctcttatcttagttattccctttcttttgctgggttttggttctgtttgtttttgtttctctagtttcttgtggtgtgaccttatattgtctgtctgtcctctttcagactctttgacatcgacatttagggctgtgaactttccttttagcaccatctttgctgtatcctagaggttttgataggttgtgtcactattgtcggtcagttcaagtaattttgttgttcttattatactttaagttctgggatacatgtgcagaatgtgcaggtttgttacataggtatagatgtgccatggtggtttgctgcacccatcaacctgtcatctacattaggtatttcttttaatgttatccctctcctaaccccctcaccccccgacaggccctggtgtgtgatgttcccctccctgtgtccatgtgttctcattgttcaactcccacttatgagtgagaacgtgtggtgtttggtttctctgttcctgtgttagtttgctcagaatgatggtttccaccttcatccatgtccctgcaaagacatgaactcatcatttttatggctgcatagtattccatggtgtatatgtgccacattttctttatccattatatcgctgatggccatttgggttggttccaagtctttgctattgtgaatagtgccacaataaacatacgtgtgcacgtgtctttatagtagaatgatttctaattctttgggtatatacccagtaatgggattgctgggtcaaacagtatttctggttctagatccttgaggaatcgccacactgtcttccacaatggttgaactaatttacacacccatcaacagtgtaaaatttttcctattcttccacatcctctccagcaccttttgtttcctgactttttaataattgccattctaactggcatgagatggtatctcattgtggttttgatttgcatttctctaatgaccagtgatgatgagcttcttttcatgtgtttcttggccacataaatgacttctttagagaagcatctgttcatatcctttgtccactttttgatggggtcgttaggttttttcttgtaaatttgttgaagttctttgtagattttggatgttagccctttgtcagatggatagattgcaaaaattttctcccattctgtaggttgcctgttcactctgatgatagtcttttgctgtgcagaagctctttagtttaattagatcccatatgtcaattttggcctttgttgtcattgcttttgatgttttagtcgtgaatttttgcccatgcctatgtcctgaatggtattgcctaggttatcttctaggatttttatggttttaggttgcacatttaagtctttaatccaccttgagttaatttttgtataaggtgtaaggaaggggtacagtttcagttttatgcatattgctagccagtttttccagcaccatttattaaatagggaattctttctccattgcttttgtgatgtttgtcaaagatcagatggtcgtagatgtgtggcattatttctgaggcttctgttctgttccactggtctatatatctgttttggtaccagtaccatgctgtttttgttactgtagccttgtagtatagtttgaagtcaggtagcatcatgcctccagctttgttctttttgtttaggattgtcttggctatatgggctcttttttgattccatatgacatttaaagtagttttttctaattctttgaaaaaagtcagtggtagcttgatggggatagcattgaatctataaattactttgggcagtatggccattttaaagatattgattctttctatctatgagcatggaatgtttttccatttgtttgtgtcctctcttatttccttgagcagtgagtggtttgtagctctccttgaagaggttcttcacatcccttagaagttgtatttctaggtattttattttattctctttgcagcaattgtgaatgggagttcacccatgatttggctctctgcttgtctattattggtgtataggaacgcttgtgatttctgcacactgattttgtatcttgagactttgctgaagctgtttatcagcttaagattttgggctgagatgacagggtcttctaaatatacaatcatgtcatctgcaaacagagacaatttgacttcctctcttcctatttgaatatgctttatttctttctcttgcctgattgtcctggcgagaacttccaatactatgttgagtaagagtggcgagagggcatccttgtcttgtgccggttttcaaagcaaatgatttttaaatttccatcttgatttcattgttgacccaatgatcattcaggagcaggttatttaatttccctgtatttgcatggttttgaaggttccttttgtagttgatttccaattttattctactgtggtctgagagagtgcttgatataatttcaatttttaaaaatttattgaggcttgttttgtggcatatcatatggcctatcttggagaaagttccatgtgctgatgaatagaatgtgtattctgcagttgttgggtagaatgtcctgtaaatatctgttaagtccatttgttctttaaatccattgtttctttgtagactgtcttgatgacctgcctagtgcagtcagtggagtattgaagtcccccactattattatgttgctgtctagtctagtagtaattgttttataaatttgggatctccagtattagatgcatatatattaagaattgtaatattctcccattggacaagggcttttatcattatatgatgtccctctttgtcttttttaactgctgtttctttaaagtttgttttgtctgacataagaatagctgctttggctcgcttttggtgtccatttgtgtggaatgtcattttccacccctttaccttaagtttatgtgagtccttatgtgttaggtgagtctcctgaaggcggcagataactggttggtgaattcttattcattctgcaattctgtatcttttaagtggagcatttagtccatttacattcaacatcagtattgaggtgtgaggtactattccattcttcgtggtatttgttgcctgtgtatctttttatctgtatttttgttgtatatgtcctatgggatttatgctttaaagaggttctgttttgatgtgcttccagggtttatttcaagatttagagctccttttatcagttcttgtagtgttggcttggtagtgccgaattctctcagcatttgtttttctgaaaaacactgtgtattttcttcatttgtgaagcttagtttcactggatataaaattcttggctgataattgttttgtttaagaaggctgaagatagggccatattcacttctagcttttacggtttctgctgagaaatctgctgttaatctgataggttttctttcataggttacctggtagtttcacctcacagctcttaagattctctttgtctttagataactttggatactctgatgacaatgtacctaggcaatgatatttttgcaatgaatttcccaggtgtttattgagcttcttgtatttggatatctaggtctctagcaaggtgggggaagttttccttgattatttccctggataagttttccaaacttttagatttctcttctttctcaggaatgctgattattcttaggtttgattgtttaacataatcccagatttcttggaggctttgttcatattttcttattcttttttctttgtctttgttggattgggttaattcaaaaactttgtcttcaagctctgaatttcttctgcttggattctattgctgagactttctagagcattttgcatttctataagtgcatccattcatccattgtttcctgaagttttgaatgttttttatttatgctatctctttaactgaagatttctcccctcatttcttgtatcatatttttggtttttttaaaattggacttcaccttcctcggatgcctccttgattagcttaataactgaccttctgaattatttttcaggtaaatcagggatttcttcttggtttggatgcattgctggtgagctagtatgattttttggggggtgttaaagaaccttgtttttcatattaccagagttagttttctggttccttctcacttgggtaggctctgtcagagggaaagtctaggcctcaaggctgagacttttgtcccatgaggtgttcccttgatgtagcacagtcccccttttcctaggcgtggggcttcctgagagccgaactgtagtgattgttatctctcttctggatctagccacccatcaggtctaccagactccaggctggtactggggtttgtctgcacagagtcttgtgacgtgaaccatctgtgggtctctcagccatagatacaaccacctgctccaatggaggtggcagaggatgaaatggactctgtgagggtccttacttttggttgttcaatgcactatttttgtgctggttggcctcctgccaggaggtggcactttctagaaagcatcagcagaggcagtcaggtggtggtggctgggggggctggggcaccctagaactcccaagaatatatgccctttgtcttcagctaccagggtgagtaaggaaggaccatcaggtgggggcaggactagtcgtgtctgagctcagagtctccttgggcaggtctttctgtggctactgtgggaggatgggggtgtagtttccaggtcaatggatttatgttcctaggacaattatggctgcctctgctgtgtcatgcaggtcatcaggaaagtgggggaaagcaagcagtcacgtgacttgcccagctcccatgcaactcaaaaggttggtctcacttccagcgtgcaccctcccccgcaacagcaccgaatctgtttccatgcagtcagtgagcaaggctgagaacttgccccaggctaccagctgcgaaaccaagtagggctgtcctacttccctgccagtggagtctgcacaccaaattcatgtccccccaccaacccccccactgcccagcccctagatctggccaggtggagattttctttttcctgtcatcttttcccagttcctctggcagccctcccaaatgacccctgtgaggcaaggcagaaatggcttcctaggggacccagagagcccacagggcttttcccgctgcttcctctacccctgtattttgcttggccctctaaattgactcagctccaggtaaggtcagaatcttctcctgtggtctagatcttcaggttccccagtgaggatgtgtgtttgggggtagacggtcccccttttccacttccacagtttgggcactcacaatatttggggtgtttcccgggtcctgcaggagcaatctgcttctttcagagggtgtgtgcgttctctcagctttcttgatttatttctgcaggtggttctgcaaaaaaaattcctgatgggagacttcacatgctgctctgtgcatccgagtgggagctgcaatgtacttctgctgcctcccatctgccatcaccctctaatttgtcggtaatatgcatttttaatcaatctttttttctctctctctctttttcttctcccccaaaactatactgccctttgatatcaaggaatcaaggacgtgatgttgaggggtgggcagtggatacactctttaccccttagggagctatatctagatttagatattgccaattcaagataacttaattgaaagcaaattcataatgaatacacacacacacacacacatctgcatgacaagatttttaatagttgaaagaataactaataattgtccacaggcaataagggctttttaagcaaaacagttgtgataaacaggtcattcttagaatagtaatccagccaatagtacaggttgcttagagattatgtcattaccagagttaaaattctataatggcttctcactccctaccactgaggacaagtttatgtccttaggtttatgcttccctgaaacaataccacctgctattctccactttacatatcaacggcactggttctttatctaactctctggcacagcaggagtttgttttcttctgcttcagagctttgaatttactatttcagcttctaaactttatttggcaatgccttcccatggcagattccttctgtcattttgcctctgttcgaatactttctccttaatttcattcttagttaataatatctgaaattattttgttgtttaacttaattattaattttatgtatgttctacctagattataatcttcagaggaaagttttattctctgacttatttaacttaaatgcccactactttaaaaattatgacatttatttaacagatatttgctgaacaaatgtttgaaaatacatgggaaagaatgcttgaaaacacttgaaattgcttgtgtaaagaaacagttttatcagttaggatttaatcaatgtcagaagcaatgatataggaaaaatcgaggaataagacagttatggataaggagaaatcaacaaactcttaaaagatattgcctcaaaagcataagaggaaataagggtttatacatgacttttagaacactgccttggtttttggataaatggggaagttgtttgaaaacaggagggatcctagatattccttagtctgaggaggagcaattaagattcacttgtttagaggctgggagtggtggctcacgcctgtaatcccagaattttgggaggccaaggcaggcagatcacctgaggtcaagagttcaagaccaacctggccaacatggtgaaatcccatctctacaaaaatacaaaaattagacaggcatgatggcaagtgcctgtaatcccagctacttgggaggctgaggaaggagaattgcttgaacctggaaggcaggagttgcagtgagccgagatcataccactgcactccagcctgggtgacagaacaagactctgtctcaaaaaaaaaaaagagagattcaaaagattcacttgtttaggccttagcgggcttagacaccagtctctgacacattcttaaaggtcaggctctacaaatggaacccaaccagactctcagatatggccaaagatctatacacacccatctcacagatcccctatcttaaagagaccctaatttgggttcacctcagtctctataatctgtaccagcataccaataaaaatctttctcacccatccttagattgagagaagtcacttattattatgtgagtaactggaagatactgataagttgacaaatctttttctttcctttcttattcaacttttattttaacttccaaagaacaagtgcaatatgtgcagctttgttgcgcaggtcaacatgtatctttctggtcttttagccgcctaacactttgagcagatataagccttacacaggattatgaagtctgaaaggattccaccaatattattataattcctatcaacctgataggttaggggaaggtagagctctcctccaataagccagatttccagagtttctgacgtcataatctaccaaggtcatggatcgagttcagagaaaaaacaaaagcaaaaccaaacctaccaaaaaataaaaatcccaaagaaaaaataaagaaaaaaacagcatgaatacttcctgccatgttaagtggccaatatgtcagaaacagcactgagttacagataaagatgtctaaactacagtgacatcccagctgtcacagtgtgtggactattagtcaataaaacagtccctgcctcttaagagttgttttccatgcaaatacatgtcttatgtcttagaataagattccctaagaagtgaacctagcatttatacaagataattaattctaatccatagtatctggtaaagagcattctaccatcatctttaccgagcatagaagagctacaccaaaaccctgggtcatcagccagcacatacacttatccagtgataaatacacatcatcgggtgcctacatacatacctgaatataaaaaaaatacttttgctgagatgaaacaggcgtgatttatttcaaataggtacggataagtagatattgaagtaaggattcagtcttatattatattacataacattaatctattcctgcactgaaactgttgctttataggatttttcactacactaatgagaacttaagagataatggcctaaaaccacagagagtatattcaaagataagtatagcacttcttatttggaaaccaatgcttactaaatgagactaagacgtgtcccatcaaaaatcctggacctatgcctaaaacacatttcacaatccctgaacttttcaaaaattggtacatgctttaactttaaactacaggcctcactggagctacagacaagaaggtgaaaaacggctgacaaaagaagtcctggtatcttctatggtgggagaagaaaactagctaaagggaagaataaattagagaaaaattggaatgactgaatcggaacaaggcaaaggctataaaaaaaattaagcagcagtatcctcttgggggccccttccccacactatctcaatgcaaatatctgtctgaaacggtccctggctaaactccacccatgggttggccagccttgccttgaccaatagccttgacaaggcaaacttgaccaatagtcttagagtatccagtgaggccaggggccggcggctggctagggatgaagaataaaaggaagcacccttcagcagttccacacactcgcttctggaacgtctgaggttatcaataagctcctagtccagacgccatgggtcatttcacagaggaggacaaggctactatcacaagcctgtggggcaaggtgaatgtggaagatgctggaggagaaaccctgggaaggtaggctctggtgaccaggacaagggagggaaggaaggaccctgtgcctggcaaaagtccaggtcgcttctcaggatttgtggcaccttctgactgtcaaactgttcttgtcaatctcacaggctcctggttgtctacccatggacccagaggttctttgacagctttggcaacctgtcctctgcctctgccatcatgggcaaccccaaagtcaaggcacatggcaagaaggtgctgacttccttgggagatgccataaagcacctggatgatctcaagggcacctttgcccagctgagtgaactgcactgtgacaagctgcatgtggatcctgagaacttcaaggtgagtccaggagatgtttcagcactgttgcctttagtctcgaggcaacttagacaactgagtattgatctgagcacagcagggtgtgagctgtttgaagatactggggttgggagtgaagaaactgcagaggactaactgggctgagacccagtggcaatgttttagggcctaaggagtgcctctgaaaatctagatggacaactttgactttgagaaaagagaggtggaaatgaggaaaatgacttttctttattagatttcggtagaaagaactttcacctttcccctatttttgttattcgttttaaaacatctatctggaggcaggacaagtatggtcattaaaaagatgcaggcagaaggcatatattggctcagtcaaagtggggaactttggtggccaaacatacattgctaaggctattcctatatcagctggacacatataaaatgctgctaatgcttcattacaaacttatatcctttaattccagatgggggcaaagtatgtccaggggtgaggaacaattgaaacatttgggctggagtagattttgaaagtcagctctgtgtgtgtgtgtgtgtgtgtgcgcgcgtgtgtttgtgtgtgtgtgagagcgtgtgtttcttttaacgttttcagcctacagcatacagggttcatggtggcaagaagataacaagatttaaattatggccagtgactagtgctgcaagaagaacaactacctgcatttaatgggaaagcaaaatctcaggctttgagggaagttaacataggcttgattctgggtggaagcttggtgtgtagttatctggaggccaggctggagctctcagctcactatgggttcatctttattgtctcctttcatctcaacagctcctgggaaatgtgctggtgaccgttttggcaatccatttcggcaaagaattcacccctgaggtgcaggcttcctggcagaagatggtgactggagtggccagtgccctgtcctccagataccactgagctcactgcccatgatgcagagctttcaaggataggctttattctgcaagcaatcaaataataaatctattctgctaagagatcacacatggttgtcttcagttctttttttatgtctttttaaatatatgagccacaaagggttttatgttgagggatgtgtttatgtgtatttatacatggctatgtgtgtttgtgtcatgtgcacactccacacttttttgtttacgttagatgtgggttttgatgagcaaataaaagaactaggcaataaagaaacttgtacatgggagttctgcaagtgggagtaaaaggtgcaggagaaatctggttggaagaaagacctctataggacaggactcctcagaaacagatgttttggaagagatggggaaaggttcagtgaagggggctgaacccccttccctggattgcagcacagcagcgaggaaggggctcaacgaagaaaaagtgttccaagctttaggaagtcaaggtttaggcagggatagccattctattttattaggggcaatactatttccaacggcatctggcttttctcagcccttgtgaggctctacagggaggttgaggtgttagagatcagagcaggaaacaggtttttctttccacggtaactacaatgaagtgatccttactttactaaggaacttttcattttaagt

SEQ ID NO: 849 - DNA, 14073 bp, Homo sapiens
  source 1..14073: mol_type = genomic DNA
catctgggctcgctgagacctgggcaggcacaggcccaggttctgacaagcagagggtgaaaggtttcgttctaggcctgaagggccttacagggcagccagggcactacagcctctaaagtcccagcatctgggatcagggcactgtcccagcttcaaattcccagcatctgatcccctgggaggggccagggagcttttccttccctggaacgctgctgggaggtcatgagcctgcagaaggggtggcgggcaacccagtctggggctgggagggaggtcctgtggccagaggagacggtggaggggctgggggcaccaggcgtgctggaggcggagggcgggagatttggggaccaggctgcacagaacccgtcggaagcagggcgatcagccgggagctgcagaggcctggggggcctctagcccagggcagcctgggaggggcagctgcctgggcacccgggccccgcgaggaggggctggggcctgctgcggggtcgcagatgtgtcccggtgctcggagagggccgcagggcgcgtgggccgtggcgggaggccgcgctgctgggagctcacggcccccgccccccgtcccaggctcttcctcagccacccgcagaccaagacctacttcccgcacttcgacctgcacccggggtccgcgcagttgcgcgcgcacggctccaaggtggtggccgccgtgggcgacgcggtgaagagcatcgacgacatcggcggcgccctgtccaagctgagcgagctgcacgcctacatcctgcgcgtggacccggtcaacttcaaggtgcgcggggcgcggtgcgggcggggcgggacggggcggggcgcggtgcgggcggggcggggcggggcggggcggggaggggcggggaggggcggggtcgcggggcggatgcgggggtcgccgggcggggcccgggctaggccccgccccctcactgagccgcccccgcccccagctcctgtcccactgcctgctggtcaccctggccgcgcgcttccccgccgacttcacggccgaggcccacgccgcctgggacaagttcctatcggtcgtatcctctgtcctgaccgagaagtaccgctgagcgccgcctccgggacccccaggacaggctgcggcccctcccccgtcctggaggttccccagccccacttaccgcgtaatgcgccaataaaccaatgaacgaagcagcgtccacctggtctctgttgtccgtgggcggcgggcgcttggggaggcggagcgggaggagggcgccccggctgtctcggggccactgctgggccgcagggatccttgcaccgaccccagggtctctaagaggcagagggatgtgcagctcccggggcgggagcgggggtcactcgggacccaggcgtggtggagaaggggtgcagttaggcctttgcggaggggggagcagtgctggcgcccacccgccgcggctctccctgggacctccgtggtcttccttctttatttctcccgaatgtgtactatttcctgatttcagaacgatcaggacgaagaggggagggatgggcgtctgcgctcactcattccttcttccattcctcaatgaaacatttactgggcataagacagcctaggcatgtttctaggctatggataccgcagctgaaataaagaaagccctctgccccgtggggctgacaatctagtgggggatacagacgtgatgaagacagtcagatcacagttcacagaaatgagacaggaaaagaggctgagcctcactcataagagaaacgcaagttaaactacacaaaaataaaaaacctcactgagatccatgtctcacctccctgataggcaaaaatccaagagtttgatcagactgcaggcgcccctcctccactgggcacccctcatccagggcagagggaaccagcccggggcgcaagtccaccggggcatctcatttgctaaagacctgaaaacccaggtgtccatcatcaggactaactggaaaaaccaagggtatccgcaccatggagagctcgactgaaaaaaaaaaatgaggataattggataatttctttttttttttttttttttttcagacggagtctcgctctgtcgcccaggctggagtgcagtggtgcgatcccggctcactgcaagctccgcctcctggtttcaagcgattctcctgcctcagcctcccgagtagctgggtctacaggcgcccgccaccacggctggctaattttttgtatttttagtagagacggggtttcaccgtgttagccaggatggtctcgatctcctgacctcgtgatccacccgcctcggcctcccaaagtgctgggattacaggtgtgagccaccgcgcccgacctaaaatgaggataatttctaataatgaaaataaagaggttagaatggtgtgtatacaatggtggaacagaggagaaacacgaatatgtgtgtgcacatatatgtgagcttatgcataactatgtatgaggctgcgtgtggacatgtgtgtttgtgcacaaccatgtatgtgcccgcatgtgcttatttctgcaaaaataaaccatggcaggacaaaccggaaatgaatacaaataataaggtgggtggggatggaggggaaggtggaaggaagctcctgcaagtctgactctctacatagttttgacctttgatttgtgtaaatattttacattatcaaaaataaattcaggctgggcatggtggctcatacctgtagtcctagcactttgggagtccaaggggagaggattgcttgaggccaggagttgaaggccaccctggccaacatagagagaccctgtctttaaaaaaaattacaaaattaaggccgggcgcggtggctcacgcctgtaatcccagcactgtgggaggccgaggtgggcggatcacgaggtcaggagattgagaccgtcctggctaacacggtgaaaccccgtctctactaaaaagtagaagaaattagccgggtgtggtggcgggtgcctgtagtcccagctacttgggaggctgaggcaggagaatggtgtgaacccgggaggcggagcttgcagtgagccaggttcaagccactgcccttcagcctaggtgatagagtgagactccttctcaaaaaaaaaaaaaaaattacaaaattaataagattaaaataaaaagaggggccttgccagtggctcaagcctctaatcctaccacttgggaggccaaggctggaggatcccttgatgccaagagtcggaggccagcctaggtaacacagcaggacctcgtctcaaaaagattaaaaaattaactgggcatggtagcctccaaattgggggttagcctgggaggtttgcccaggaaggaattcaagggcaagctggtggtgttacacagcaactctgattgatatcgaagccacagcagacagcaggagcagaacactgctccttacagagcaggggtaccccataggctgtgtgcacaggagagcaactcagaggcactgctgcactcatctttatacccacttttcattatatgcaaattaagggaaagttatgcacaaatttctaggatgagtgtggtaacttctgggtggtccagtcactgccatggaaagggatggtaaactcccatggcacactggtgggtgtgtcttatggaaagctgcttctgccctacttgttttagctggtcctcagtttggtccggtgtccgagcccaacatccggagtacatgcagagtcccacctcctacgtcacacctgcagttccagctactcaggaggctgaggctggaggattgctggagcccagatgttgaaggctacagtgagctatgattgtgccaccgcacttcagcctgagcaacacagcaatactctctctctaaaaaagcaaagcacacaaacaaaaagagtgactgggtgcagtggctcacacttggaatcttagcactttgggaggccaaggtgggatggtcacttgagcctgggagttcaagaccagcctaggcaacatagcaagactttatctctactaaaatatatatatattttttaattagctggacatggtggtgcacctgcagtcccagctacttgggaggctgagttgggggtggaggggagtatcacttgagcccagaagttccaggctgtagtaagctatgattgcaccactgcactccagcctgggcaacagagagagaccttatctatatttaaaaaaaaaaaaaaaaagagagagaaaattgaaaactcctaattgaaaacccccaaattgaaaactaacttaaataaatgagccaatgtaagaatgtggtgatataataatcagaaaaaaggattgttccaggtgacctctgaacacagaacctcggctatgaccgaaagaactccaaagacactctaacactccgtggtttattgttcctcataacatatataaaataatttcataagcttttattttgaaacatattcagattatgaagaaataaaaacaccctgcaagaataagacaaagatggagaaggaaggatgactgctggtgggtttggggcttttggagggtgatggaaaccttctaaaattgattatggtgatggtcgcacaattatgtgaacacattaaaaattattgaaatgggccgggggtggtggctcacccctgtaatcccagcactttgggaggccaacgcgggcagattacctgagctcaggagttccagactaacctggccaacatggtgaaacccccgtccctactaaaaatgcaaaaattagccacgcatggtggcacatgcctgtaatcccagctactggggaggctgaggcaggagaattgcttgaacccaggagacagaggttgcagtgagccgagattgtgccactgaactccagcttggccgacagagtgagactctgtctcaaaaaaaaaaaaaattattgaaatgtacacattaagtgggtgaattttatctcaataaaactgttaaataaaataacaagaatatgaaaaactcttgaatactactcatccagactctccagctgttaacattctaccacatcggcttgctctctcttgcccccacttgctctttctctcggagcccttggagaggggtatgcaaatatccgtactctaaatatcctccatatactgtgtatttcctaaaatcaacaaggacattaggctgcacagccagagaacaaccatcaaaatcaggttaatattgatccaaatccatctatcaacagaagcaacatcaagttcaagacccttttgaaagcaatgataccagccatttactccatccctaaaggactgagggtgctgcgaatttaaccgtatcaatgcagtctttttgatgttatttactgaaggaaatggatgttctttaaaatatgtatttatttatttttcttttttgagacggaatcttgttctgtcgcccaggctggagggcagtgggacaatcttggttcactgcaacctctgcctcctgggttcaagaggttctcctgcctcagcctcccgagtagctgggattacaggcgcgaaccaccacgcccggttaattttggtatttttagtagaggcggggttttaccatgttggccaggctggtctcaaactcctgacatggtagcctgtaatcccagctactcgggaggctgaggcaggagaatcgcttgaacccaggaggtggggttgcagtgagccaagatcgtgccattgcactccagcctgggagacagagcgagactccatcaaaaaaaaaaaaaaaaaaaattcctgaagctcctcttgagcttacattctagtggactgtaaacagaaacatttttttttcctgtggataaagaaaagcagggcaagtaggggcttagacagaggaggggaggattcagattttaaatgggttggccactgtaggtctattaacgtggtgacatttgagggagtggcaatactagggaaggggcttcaggggagtggccaggagctagggatagagggagggaggacaggaggccttgtctgtcttttcctccatatgtaagtttcaggagtgagtggggggtgtcgagggtgctgtgctctccggcctgagcctcaggaaggaagggcagtagtcagggatgccagggaaggacagtggagtaggctttgtggggaacttcacggttccattgttgagatgatttgctggagacacacagatgaggacatcaaatacatccctggatcaggccctggggcctgagtccggaagagaggtctgtatggacacacccatcaatgggagcaccaggacacagatggaggctaatgtcatgttgtagacaggatgggtgctgagctgccacacccacattattagaaaataacagcacaggcttggggtggaggcgggacacaagactagccagaaggagaaagaaaggtgaaaagctgttggtgcaaggaagctcttggtatttccaatggcttgggcacaggctgtgagggtgcctgggacggcttgtggggcacaggctgcaagaggtgcccaggacggcttgtggggcacaggttgtgagaggtgccctggacggcttgtggggcacaggctgtgagaggtgcccaggacggcttgtggggcacaggctgtgagggtgcccgggacggcttgtggggcacaggttgtgagaggtgcccgggacggcttgtggggcacaggtttcagaggtgcccgggacggcttgtggggcacaggttgtgagaggtgcccgggacggcttgtgggacacaggttgtgagaggtgcctgggacggcttgtggggcacaggctgtgagggtgcctgggacggcttgtggggcacaggttgtgagaggtgcccgggtcggcttgtggggcacaggttgtgagaggtgcccgggacggcttgtggggcacaggttgtgagacgtgcccgggacggcttgtggggcacaggctgtgagggtgcccgggtcggcttgtggggcacaggctgcaagaggtgcccgggacggcttgtggggcacaggctgtgagggtgcccgggacggcttgtggggcacaggctgtgagggtgcccgggacagctcgtggggcacaggttgtgagaggtgcccgggacggcttgtggggcacaggctgtgagggtgcctgggacggcttgtggggcacaggttgtgagaggtgcccgggacggcttgtggggcacaggttgtgaggatgcccgggatggcttgtggggcacaggttgtgagaggtgcctgggacggcttgtggggcacaggctgtgagggtgcccgggacggcttgtggggcacaggctgtgagaggtgcctgggacggcttgtggggcacaggctgtgaggatgcccgggacggcttgtggggcacaggttgtgaggggtgcccaggacggcttgtggggcacaggctgcaagaggtgcccaggacggcttgtggggcacaggttgtgagaggtgcccgggacggcttgtggggcacaggctgtgagggagcccggcacggcttgcagctacagggagaaaagacttggtgctgtgggcctgccttggggctggtggtacagcccttatctgctgccctcaggatctcccggcccctctcgtccaggcccctgcaaccccatgccccagcctctgaggaccaaaggcgcccctgcttgggaagagggggctcaggggagtcgcctgacccggttccaagccaggctgatttaccgttgctaacatcctatcgcacgcatccctctgcctcatgcacccaaccccaaggcctggtacactgcaggccccaaggtcctgtgcgtcctttcaataccctcctcacctgcctcacctgccccccctaccctgactctggctggagaccccctccagggagttttcaaaacaaagggtgtcagtctcctgtgggattccctcacctctgcagcctgcggtctgaaagctgccccatggtgtgtagtgctaaacttccaacttactccaggccagcggtgacagcccgagggcaggaagggcacccacactgagcctcaaacagctaattttgcaactgtaagtccatataattgtcttgaaaagtaatttgtttcaaaaagctaaaaaacgaatactcttgagtctccttctagtaattccccttctagaggtctatcaccaggaaaagatccaaagcactgatattcttcatggagttgtttataatagaaaaaaactagagcttgttcacaaaggggagctctgcaggctgaagatgttgcacctgtcagcggggatgggggcacgcttgctgacgcagcaacggaaaagcatcagtgtgtgaagatgcattttctctctttctattattattatttttatttttattttttctgaggcagaacctcgctctgtcacccaggctggagtgcagtgatgcgacctcatcacaaccacgagccaccatgtgcggccccatgagcaagccaccacgcccagcctttttttcccttgttttaaaaaatcctctatttaaaaaagatgtgcatgggccgggcacggtggttcacgctcataatcccagctctttcagaggccgaggcaggcagatcacctgaggtcaagagttcgacaccagcctggccaacatggtgaaattccatctgtactaaaaatacaaaaattagccaggccgtggtggtgtgtgcctgtaatcccagctactcaggagactgaagcaggagaatcacttgaacccaggaggcagaggttgcagtgggtcaaaatcatgccaccacactccagtctgggagacagagcaagactccatctcagaaacaaactaacaaacaaaatttttatatctacctataattcgtataaatttaaaatacatgcataaaatcataccctttgcaagcacacgtactaactaaaaggaatatattcagcacatagaaatggttgtctaacggaggaggggggagttaataaacagagaggataaaaagaaataaatcagtagagctggaggagggtctcctccaggctgcgatgagaacatagtgagcagaattgcaggcctgcatgacctcaccttctgtgaggagtccggcctcccaagacgctttcctgcctaggtgcccggctcagagtgtcccctacaaggctactggaggagaaccccagaccgagcctcattcaggtgagggggctgcacaccggaggtgggagaggtctgtcccttcccaccctgtgacactgggtcccactttctctctagggggtctcggtttcctcatttgcaaactggagctcataaggtgggccagagaagtttcagtgaagtgaggaatggatcgtccctctgccagggcccatgtgctctaggtcaccctgtcatcacagggacagggaggtcaaggacagtcactcctgaggccagtccgggctgggctgaccacgtggactctcatgcccagattggggccccaatctccctgaagctggggctccagctgtgactcaggggtgggcagaaggggagacagaagcgataggttcctcagcccccagtcccacctgagggcccctttgtcactggatctgataagaaacaccacccctgcagccccctcccctcacctgaccaatggccacagcctggctgggcccagctccctgtatataaggggaccctgggggctgagcactaccaaggccagtcctgagcaggcccaactccagtgcagccgcccaccctgccgccatgtctctgaccaagacttaggggaccatcattgtgtccatgtgggccaagatctccacgcaggccgacaccatcggcaccgagactctggagaggtgagtgtcagatgggactgccagagggactgggtgggaggccaggtatgtgagtggggacagtggggagcgggcagtggggaggggaccgtggggaggggacagtgagtaggagacagtggggagaggacagtggagaggggacagtgaggaggggaccatgggaaggggaccgtggagtggggacagtgaggaggggaccatagggaggggacagtggggaggggacagtgaggaggggaccgtggggaggggacagtgaggaggggaccgtggggaggagacagtgaggaggggaccgtagggaggggacagtgaggaggggaccgtggggaggggacagtgaggaggggaccgtggggaggggacagtgaggaggggaccgtgggaaggagacagtgaggaggggaccttggggaggggacagtgaggaggggaccatggggaggggacagtgaggaggggacaatggagaggggacagtgaggaggggactgtggggagaggacagtgaggaggggaccatggggagggcacagtggggaggggagagtgaggaagggacagtgaggaggggactgtggggaggggacagtggagacagatagccttccctctcagtgaggagggcagggtaaggagggaacgattaggagttgcacaaccatctgggctcgctgagacctgggcaggcacaggcccaggttctgacaagcagagggtgaaaggtttcgttctaggcctgaagggccttacagggcagccagggcactacagcctctaaagtcccagcatctgggatcagggcactgtcccagcttcaaattcccagcatctgatcccctgggaggggccagggagcttttccttccctggaacgctgctgggaggtcatgagcctgcagaaggggtggcgggcaacccagtctggggctgggagggaggtcctgtggccagaggagacggtggaggggctgggggcaccaggcgtgctggaggcggagggcgggagatttggggaccaggctgcacagaacccgtcggaagcagggcgatcagccgggagctgcagaggcctggggggcctctagcccagggcagcctgggaggggcagctgcctgggcacccgggccccgcgaggaggggctggggcctgctgcggggtcgcagatgtgtcccggtgctcggagagggccgcagggcgcgtgggccgtggcgggaggccgcgctgctgggagctcacggcccccgccccccgtcccaggctcttcctcagccacccgcagaccaagacctacttcccgcacttcgacctgcacccggggtccgcgcagttgcgcgcgcacggctccaaggtggtggccgccgtgggcgacgcggtgaagagcatcgacgacatcggcggcgccctgtccaagctgagcgagctgcacgcctacatcctgcgcgtggacccggtcaacttcaaggtgcgcggggcgcggtgcgggcggggcggggcggggccgcggggcgggcggggccgcggggcggggtcgcggggcggggcggggtggggtcgcggggcggggcggggtcgcggggcggggcggggcggggcggggcgggcggggcggccggggcccggcggggcggggcggggcggggaggggctgggcggggcggggcgcggggcggggcgggccgggccggggcggggtcgcggggcggggtcgcggggcggggcgcggggcggggcggggcggggtggggtcgcggggcggggcccgggctaggccccgcccccgcactgagccgcccccgcccccagctcctgtcccactgcctgctggtcaccctggccgcgcgcttccccgccgacttcacggccgaggcccacgccgcctgggccaagttcctatcggtcgtatcctctgtcctgaccgagaagtaccgctgagcgccgcctccgggacccccaggacaggctgcggcccctcccctgcccttcaccctcccacagttcctgccctgactccaataaatggatgaggacggagcgatctgggctctgtgttctcagtattggagggaaggaggggagaagctgagtgatgggtccgggggcttcgcaggaactcggtcgtccccactgtcgtcgcggcctggggttcacttggggggcgccttggggaggttctagcccctgagcaccggagctgcggcccgggtggagcggagcagtcccgggccggcccgcggcgtctcctggggtccttgagtcggacgggcgtttgtgcgtctcccggcttcccatatcgcacaaagattgtcacttcactaagcgtattggaagcgtgtcggggctcagggaacttttccacaaagcctgacgtccgaatcccgggactctggcagctacgggggtccctgaggccggtccctccccgactcctaagagagtagggggtttcctgcccggtgttctctctccggttcctcccatgtgctccctcctggcagagcagtaactttacccgaggggagtaaacagatgcccctaaagtctgcagtaaaggtgcccacgcgcaacggcgtgggtcaatgccagaaaccctgggatcccggaggtcgaggcctccacacagacgggaacccgggctggttacgttccccggcgcaggccgagggtccccgcgttcccgccgcgctcgggccgataaggacgggcggggtgcccggaggctctataaggaggccagggcggcgggcgcggcccccagagcacgtcaggcggcgccatgctcagcgcccaggagcgcgcccaaatcgcgcaggtctgggacctgattgcgggccacgaggcgcaattcggggcggagctgctgctcaggtcggtagaggcggggtctccgggagctcagggaggtggagatgagggttttgggcgcgtgggccgccaacgccatccaaggtccttcgggtgcggatccccgggctctgggcggtgtgggcgctagtgaagccccacgcagccgccctcctccccggtcactgacctggtcctgcaggctcttcacggtgtaccccagcaccaaggtctacttcccgcacctgagcgcctgccaggacgcgacgcagctgctgagccacgggcagcgcatgctggcggctgtgggcgcggcggtgcagcacgtggacaacctgcgcgccgcgctgagcccgctggcggacctgcacgcgctcgtgctgcgcgtggacccagccaactttccggtgaggcctttccggccggggcaatggtgcagcgcgcagccggggtgggggggctctgggggtccctagcggggcagaccccgtctcaccggccccttctcctgcagctgctaatccagtgtttccacgtcgtgctggcctcccacctgcaggacgagttcaccgtgcaaatgcaagcggcgtgggacaagttcctgactggtgtggccgtggtgctgaccgaaaaataccgctgagccctgtgctgcgcaggccttggtctgtgcctgtcaataaacagaggcccgaaccatctgcccctgcctgtgtggtctttggggagctagcaaagcgaggtcactattgttggccagtgaagctcagggacctaaaaggagcctcctagaactctcaaatgcgccccacccccggaggtttgtcctcccatggcgaggagtgcgatggggcagagggagcactgtgatgtggcgggggtagggagggtggccttcgacttcaacccttgaatcgggcttccaaccatactgttcgcaaagcacttccccattcacgcatttattcattcattctccctccatccccacttcctgctgggacctgtagatgctaatcctggccctttttgcagagagatgcagaaactgaggtcccagagccaaatgtgcaacctaattcgttggcccagagcagagggctccgcagacctgttcctttccccttccttcccccatggacacttcctcagtggcaaacctgcgctagcctggttagccctccctgtgaccctgcagccctggggatgaggtcgggaggaagtcctcagtggccacaatttggcagacagagcaggtttagtcttccagcctgctcaatgacaagctgtgcgaccctg

SEQ ID NO: 850 - DNA, 1921 bp, Homo sapiens
  source 1..1921: mol_type = genomic DNA
tttatataataaatgagaaaacagactcgggcaagtgtcacaatagaatcaagaggcagaataaactgacttccaatgccaaatccatgccgaaattcagtgctataataatgtacatggccgggcgcggtggttcacgcctgtaatcccagaactttgggaggctgaggcgggaggatcacctgaggtcgggagtttgagatcagcctaacacggtgaaaccctgtctctactaaaaatacaaaattggcatggtggcatgcacctgtgatcccagttactcgggaggctgaggcaggagaatcgtttgaacccgggaggcggaggttgcagtgagccggaatggcgccactgcactcaccgcacccggccaatttttgtgtttttagtagagactaaataccatatagtgaacacctaagacggggggccttggatccagggcgattcagagggccccggtcggagctgtcggagattgagcgcgcgcggtcccgggatctccgacgaggccctggacccccgggcggcgaagctgcggcgcggcgccccctggaggccgcgggacccctggccggtccgcgcaggcgcagcggggtcgcagggcgcggcgggttccagcgcggggatggcgctgtccgcggaggaccgggcgctggtgcgcgccctgtggaagaagctgggcagcaacgtcggcgtctacacgacagaggccctggaaaggtgcggcaggctgggcgcccccgcccccaggggccctccctccccaagccccccggacgcgcctcacccacgttcctctcgcaggaccttcctggctttccccgccacgaagacctacttctcccacctggacctgagccccggctcctcacaagtcagagcccacggccagaaggtggcggacgcgctgagcctcgccgtggagcgcctggacgacctaccccacgcgctgtccgcgctgagccacctgcacgcgtgccagctgcgagtggacccggccagcttccaggtgagcggctgccgtgctgggcccctgtccccgggagggccccggcggggtgggtgcggggggcgtgcggggcgggtgcaggcgagtgagccttgagcgctcgccgcagctcctgggccactgcctgctggtaaccctcgcccggcactaccccggagacttcagccccgcgctgcaggcgtcgctggacaagttcctgagccacgttatctcggcgctggtttccgagtaccgctgaactgtgggtgggtggccgcgggatccccaggcgaccttccccgtgtttgagtaaagcctctcccaggagcagccttcttgccgtgctctctcgaggtcaggacgcgagaggaaggcgccgcccctccccaaggaaaggcgagggcctggggcacacccccagtgcccagatccaggcgcgcctctttccacctccagcaggtttggggcctcggccatgggggcaccgaactgcgtgcagcctgaccctcccgaatggggtggtaggtgagggccgcgggacgccccgggcggcgggctgcgaggacggccgactctgcccatcccgagggcggctggcttcgccctccccactctgcgccgagcacgcggcccggacccaccgcgagaactccgcacctgcagcgtgaacgcacgcgggcggcgttaagggcccggggctgactcggagcaggttagggaacagcgccccctcccggcgcgagccggtacctgcgcagcacccagccgccgcggctgtggcctggaatcggggacctggggtgccggggggttgtggtgaaggaggtgggaccagccccagcacctagccacgtagctggcgaggtggaccaggaaccgacccagacccctgccgtcacccgacatcactacggagagtgaagctttttt

SEQ ID NO: 851 - DNA, 12976 bp, Homo sapiens
  source 1..12976: mol_type = genomic DNA
agctgcatcacttaattatttgcagagaattgcttttcttgttttctttacaggtggtctgttcttggatggtctggctgtgttctttctgaggaatacataacctctgctacacattttgcaaggctttatccccgttgtccatgttttgattttatgtataatcaaaaggtttgtgagttctcccgcacttcccaggagtgcctctgggatggaaatgagactgcaggagcagggcttgaggctggaggggtgagatgggacagatgggggtgggggaacccagggcagtggccggtggtggtaatggaggcctcctcacagggaccctcacagcgaccatgcgaatggagcaggactgtgactcaggtctcgctcttctgacctaatcgtgctgctgccccaatgggcagaaccttggggctccagactggacatctctgggctcaaaggatcccactgttcccccggttaccctctcagggttggcctcctgccagtaaccctggcactcattgttcattcttctgactatcgtcagtcataatgagagctcgaactggtgaaagtgcagggagctcaccatgaccccagcccacagaggtcctgggtgcgtccctgccctcgaagcagcactctggatcccagcgccaccctcatgtccatgtttgcacctcattggctgtgacagaaatgagacatcattgtcacacgctggcctgagggtcagtgggccttgctttggacctcagtttccccaccagtaacagggttcagagcagatggtccctgagtgagtcccagctctaagttctcccagggtctcctggacaatgaagcaccagggccaacctccatttgctacaggggacatcctcaggctcttctctgctaagaccccacacctccaagtctcctcattttacctttaaatagctgtttcatgacctgcttttttgacggtaagtagatttttggaaactgaaacccctgacccttcctcccagcctgggcctgcccttggcaggataggaggccttatcggtcctgccacttggtctgggcctcaaagggccaccgccatctgcaggagggccgggtggggttcacagacgctatctgggacttgcctggacacctccaccttctcagctgagtgttgctgccccaccagggagaaccactcacacacagtagtaatagaaataatttaaaattcatgctgcaagttcctgagcgccctcccaacactgaggtgggggctagtctaatccccatcctagaggtgaaaacagtgaaactaggactcacaaggcaaattagcctgttcagggtcaccgagggtccactctcatgggagagtttgcagatgcccaatccggcattctgctgagtgtccagtggcttgtaagtggccagacaccctttgagctcagcctcagctgctcaggcacagaacgtgcctggagcttggaattcaggccagaaaccaccagtggacaccagcattccacactcactgcacaggctggggctcaaaccaaggcccagggacaggaagggacaagccccagccccagccggactcccagcccacacaaaccatcagggcttgtttcctgctccatggaagcctcagacatgtttcataacctcctggagcctccgtttccttatctttccaatgtaatgatgcccatgtgcagtggctcacgcctgtaatcccaagcactttaggaggccgaggtgggtggatcactggagctcaggagtttgaggccagcctgggcaacatggcaaaacgccatctctactaaaaacacaaatattacccaggcatagtggcacatgcctatagtcccagctactcaggaggctgaggtgggaggatcacctgagcttgggaagttgagcctgcagtgagccaagattgtcacactgcactctagcctggaggacagagtaagaagaccctgtaacaaaacaaaacataacaaaacaaacaaacaaaaaacccaactaatgacaataaaataaaccctccctcacagggtggttgtgaggataaagcacccagaatgaagagtgttgctgccatgtgcagaacttagaaagtgctcaacagatgccagccaaacagacatggactcccctcaacacagtcaacccaaggttgactgtcaccaaacgcaaaagaccacactgtaaagcttttagaaatgtggtctagtggccgggcactgtggctcatgcctgtaatctcagcactttggaaggctgaggcgggcggatcacagggtcaggagttcgagaccagcctgaccacctgaccaacgtggtaaaaccccgtctctactaaagattcaaaaaattagccgggtgtagtgctacgtgcctgtaatcccagctgctcgggaggctgaggcaggagaatcgcttgaacccaggaggcggaggtacagtgagctgagatcgcgccattgcactccagcctgggagacagagagagactccgtctcaaaaaaaaaaaaaaaaaaaaagttagccgggtggtagtggcatgtacctgtaatcccagctacttgggaggctgaggtaggagaatcgcttgagcctgggaggtagagggttgcggtgagccaagatggcgccactgcactccaatctgggcgagacactgagaccctgtctcaaaaaaaaaaaaaaaatgtggtctaggagactctcttcactttgagataaaatttgcatcacgtaaagataaccattttaacgagagcaagtcaacggcattcagcacattcagagtgttgtgcaacaaccacttctccctggttccaggacattttcatcgcctcagatggaaacgccctcctcacggaggcatctctcccggcctttgtcctccccggccctgacaaccactaatctactttctgctgggatttgcccattctggatgtttcctaaaaatggcttatctaagccccacagtttcatgcagcacgtagcctctggtgtgtgacgtccttcacttggtgtaatggttcgaggcttgtccatgtcgtagcctgggtcagaacttcattttcatggctgaataatatctcacggtgtggaaatatcacagtttgcttatctgttcatccagtgatggacatttgggttgtttctaccttttggctattgggaatggaagggataacattttttaattggatttttaaagtcactagtttgactgcattaaaattacaaacttttgtttaacgagaatatcactaagatacagagttggggagatctaacacataaaagtgacaaaggaattatatccagaatatttttgaaatttctacaaatcagtgactggcaacacagtgggaaagtggccaagactaaaatactttaataaagaggaaaccgaaatggccagtaaatatgggctcaacctcactaattatcaggaaaatgtaaattaagaccacaagagaaaccactacacactcaccaaaaatcacacacccaataaaaaggtaatttttttttttttttgagatgaagtctcactctattgcccaggctggagtacaatggcgcgatcttggctcactgcaacctccgcctcctgggttcaagcgattctcctgcctcagcctcctgagtacctgggattacaggcgcacaccaccacacccagctaattttgcatttttaagtagagacggggtttcaccatgtgggcaaggctagtctcgaactcctgacctcgtgatctgcccgccttggcctcccaaagtgctgagattacaggcatcagccactgtgcccggcctaaaaaaggctaaaatttaagaagaccaggagtttgactgctatggttggaatgtttgtctcctctaaaactcttgttgaaacttaatccccagtgtggcagcgttgagaggtggggcctttggggtaaggaggttggatcatgagggtcctcccccaaggaatggattaatgagttgtcatgggagtgtggctggtggctttataagaagagagacctggccgggcacggtggctgacacctgtaatcccagcactttgtgaggccgagatgggcggatcacaaggtcaggggatcgagaccatcctggctaacacagtgaaaccctgtctctactaaaaaaaaaatgcaaaaaaattagccgggcgtggtggcgggcacctgtagtcccagctactaggaaggctgaggcaggagaatggcgtgaacctgggaggcggagcttgcagtgagccgagatcgcgccactgccctccagcctgggcgacagagcaagactctgtctcaaaaaaaaaaagaagagagatctgaggtggcacacaagcatgctcagcccacacgacctgcgattaatactctgtgccactttgggactctgcacgagtccccactgggctcgaaacttctcagcctccgtaactataggaaataaattccttttaaaataaattccacagtctcaggtattctattataagcaacagaaaatggagtactacaccgatcatatcaaatgtttagaaggatttggagcaaggagaatgctcgcacaccactagggaaaacataagttggttaaccactgtgaaaaagtttggcattctttactaaagttgaaaatctatatgccctatgacccagcaactttactcctaggtatgtatgtacaaaatagaatttcaggcatgtgggtaccaggtgacatgtaaaggaatgtttattgcagcattattcataatagccaagaactaaacaacacaaagttccagccccagtacaatgaataaactgtggtatattcctacaaggaaatattaatagatacagcaatgaaaatgaacacatataacatggctggtaaatctgacatgagagagtgaaagaagatggacattcagtgtgcagacagttggattaaaaatatttttttaaaggccaggcttggtggctcacatctataatcctagcacttacagaggccaaggcgggcagatcacctgaggtcaggagttcaggaccagcctggctaacacagtgaaaccccatctctactagaaaatacaaaaattagccaggtgtggtggtgcatgcctgtagtcccaactactcgggaggctgaggcaggagaatcacttgaacctaggaggcggaggttgcagtgagccaagatcgcatcactgtactccatcctgggtgacagagcaagactgcgtctcgaaaataaatagataaataaataaataaccaacaggccgggagcagtggctcatgcctgtaatcccagcactttgggaggctgaggtgggcagatcacgaggtcaggagatcaagaccatcctggctaacacagtgaaaccctgtctctactgaaaatacaaaaaaattagccgggcatggtggcgggcgcctgtagtcccagctactcaggaggctgaggcaggagaatggcatgaacccgggaggtggagcttgcagtgagccgagatcatgccactgcactccagcctgagcgacagagcgagactccatctcaaaaaaataataattaaaaataaataaattaaataaataaataacagattgcataaagtggctcatgcctgtaatccaagcactttgggaggccaaggcagaaggatcacttgagcccaggagttcaggacaagcctgagcaacatggtgaaaccccacctctacaaaaaaaaaaaaaaaattagctgggcatggtggcatgtgcctgtgatcccagctacttgggaggctgaggcaggaggatcacttaagcctgggaggtcgaggctgcaatgagctatgatcgtaccactgcactccagcctgggcaatagagcaagaccctgtctcaaaacaaataaacaaaagccagacagacacaaatgagagcattctgtatcgtttcatttctatgaaggtgaaaagcaggcaaaaacaaccaaagtgcttgcagatgcatatctgagtagttaaaaacttactgaaaagcaggcctggctcacgcctttaatcccagcactttgggaagcgggcggatcacgaggtcaggagatcgagaccatcctggctaacacggtgaaaccccgtctctactaaaaatataaaaaattagccaggtatggtggctagtgcctgtggtcccagctactcgagaggctgaggcaggagaatggcatgaatccgggaggtggagcttgcagtgagctaagatcgtgcaactgcactccagcctgggcagcagagcgagactccctctcaaaaaaaaaaaaacttactgaaaagcaagaagtcaggtggaggttacctttggggaggattggggtgctgtccgctttctaataattcgttaaactatagtctacatcttgtgctatatttcacaatggaaaaacagaaaagagctcctgcccataacgctgctttgcaggtttggaaatttcagattcaattcctctccttgcgggggccaaggatgggaagagcaggtggttccagtagggaaagaggaggccctggggcctcaaaatggctaaggaccattcctcagcgtgggtggcacctaccctggaaacaggactctacttcctcctctgttagggggcagagcagccctgcagtgccttctgggcacaggtcctcactctgcagctggaggaattctcccaggcactgagagcccttcacggcccaaatgccccgtgcgctcggcctctggacttgccttccctgctctgtatatctccctccgcctgaccctcagcctcctccatcactcactgtcttctctgccagtctattcatctgtctctgtccctctctctgccaccttctctcctattgagaagccgaaacctcaggcacagacccacatcccctcctcatgggcccatgtgcccaaggtgcccctaggtgccaggctgagatgaaccaggagtgtccttctgaacccagcaacagcgaagggtgaccagggagggccagttcatctcggtctgaaagaagccccagatgagcaaaggatacactggcctcctgcggtcagcagcacttcccaggacagtgagcaagacaggggtaaggccagagtgggtgggcacacccatgggagagaggagccgctgtgaaatgtgcacgaggaacagaccagcaaggaggatccacgcagtgctagaagggagttcctggaagcctggtggagagcccctcccatctgctaagcccggagggcatcaaaggctgctgctgccctcaacccctgacaatctcatcatctcatatctcaggcatggaagaatgagggccattacacgagtaaaacatcaagtacactccagcctggatgacagggccaggctccatctcaaaaaaaaatgcctgtggtcaaagctctcctgacaggggaaaacaaaacaaaacaaacttctccttaaagaaaacatttgcctttgactgcatcataattccagcaggattttgtgcagataactctttggctaactctaaaattaatacagaaaggtaaagaaattagaatagccaaagaaattttgaaaaggaagaataaagcgagaggaatcacattcctcaatttttaacagctctattgagataaaattcacataccatacggttcacccatttaaagtgtataattcaggccgggcgcggtggctcacgcctgtaatcccagcactttgggaggctgaagcgggcagatcacctgaggtcgggaattcgagaccagtctgaccaacatggagaaaccccgtctctactaaaaatacaaaattagccaggcgtggtggctcatgcctgtactcccagctactcggaagactgaggcaagagaattgcttgaacccgggagacggaggttgccatgagccgagatcgcgccaccacacccagctgccattttttaattgattacttgtctatttattactgagttgtaagatattttgggccaagcacggtggctaacgcctgtaatcccagcactttaggaggctatggtgggcaaatcacttgaggtcaggagttcgagaccaggctggccaacatggcaaaacaccatctctactaaaaatacaaaaaaattagccaggtgtggccaggcgtggtgactcacgcctgtaatcccagcactttgggaggccaaggcgggtggatcacctgaggtcgggggctcaagaccagcctgaccaacatggagaaaccccgactccgctaaaaatacaaaattagccgggtgtggtggtgcatgcctgtaatcccagctactcacgaagctgaggcaggagaatggcttgagcccaggaggcagaggttgtggtgagctgagatcatgccattgtactccagcctgggcgacaagagcgaaattctgtcacaaaaaaaaaaaaaccattagccagccatggtgatgcacacccgtggtcccagctactcaggaggctgaggtatgagaattgcttgaacccaggaggcagaggttgcagcgagccaggattacgccgctgcactccagtctgggtgacagagcaagactctgtctaaaaaaaaaacaaaaacaaaaaagatattttgtatgtgtttggataacttccctatcagatatatgatttgcaaatatgtttctctcattctgtgagacatcattcaattttaagacatcacagagctatgttaatcaaggcactgtggctgtggtaaaggatagacacacagaacagaacagagagcccagaaatggacccgcaaacctatgccccattcattttttacaaataagtgcgagaagccaactgaatagaaagcgtatagctttttcaaaaaacagtgctggaacaattggacatctgtaggcaaaaaaacaaacaagcaaacagaagaatctggacctgcccttcacacctcagacaaaagtcatctcaaaatggattgtagatctcaatataaacataaactatacaactttagaagaaaatataggtgaaactctttgtgttctgtggttaggcagacagttcctaggcatggcactaagtaagattcatttaaaattttttgacaaattggactttattaaaacttttgctctacaaaagacaatattaagagaatgaactaacaagctacaaactaagagaaaacatttgcaaattgcatatctgacaagggattgcttccagacgatacacagaattctaaaaattcatccttaagagaataaaccacccaatttttaaatgggcaaaacaggccaggcgtggtggtgcacgcctgtaatcctagcactttgggaggccgaggcaggcggatcacaaggtcaggagattgagaccatcctagctaacacggtgaaaccctgtctctactaaaaatacaaaaaattagccaggcatggtggcaggtgcctgtagtcccagctactcgggaggctgaggcaggagaatggcgtgaacctgggaggcggagcttgcagtgagtggagatcgcaccactgcgctccagcctgggcaacagagcgagactccgtctcaaaaaaaagacaaaatacttgaaaagatattggctaggcgcgctggctcatgcctgtaatcccagcactttgggaggccaaggcgggtggatcacaaggtcaggagttcaagcagcctggccaagatggtgaaaccccgtctctactaaaaaaaaaaaaaaaaaaaaaaaaaaaattggccgggcacagtggctcatgcctgtaatcccagcactttgggaggctgaggcaggtggatcaggagtcaggagatcgagaccatcctggccaacatggtgaaaccccatctctatgaaaatacaaaaattagccagagatgatgccgggtgcctgtaatcccagctactcatgaggctgaggcagaagaatcacttgaaccagggagtcagaggttgcagtgagctgagatcgcaccactgcactccaccctgggcgacaaatcgagattccatctcaaaaaaagaaaaaaaaattaaaaggaatatttgcctcattatgttacaataactaatatggaaagcaatattgcaatgcctattagcacatgacattaggtgaattctcctttgtccccggacctgctgcctcctcctgcttgtcaggggacagatccagtacatctcccctcagcgctgggtggacctaacccttgctttcttggaggaaacccaggaatccagagacaaagtggaagggtactggcatgtggttgggcagggctgcctgaggtcggtgtcagccgaccgtggggcttggtcccaggaggctgcttactgggccctgctcctctggtttcccccaagtcgtgattctgaaatgaataaggacggtgcagaactggactacaaatgcaggagtgacttcctgggagggtggggcccctatctctcctagactctgtggtcagactctggccaacaccccctgtaaggccacaggagaggaacaggagtgatagcccccaaaccccagtcccaccaggccctgagggcccctttgtcactggatctgataagaaacaccacccctgcagccccctcccctcacctgaccaatggccacagcctggctgggcccagctccctgtatataaggggaccctgggggctgagcactaccaaggccagtcctgagcaggcccaactccagtgcagctgcccaccctgccgccatgtctctgaccaagactgagaggaccatcattgtgtccatgtgggccaagatctccacgcaggccgacaccatcggcaccgagactctggagaggtgagtgtcagacgggactgccagagggactgggtgggaggccaggtatgtgagtggggacagtggggagggggcggtggggaggggacagtggggaggggaccatggagaggagacagtggggagggcactgtggggagaggacagtgaggaggggaccttggggaggggacagtgaggagggaaccgtggagaggggacagtgaggaagggacagtgaggacagatagcgttccctctcagtgaggagagcagggtaaggagggaacgattaggagttgcacaaccatctgggctcgctgagacctgggcaggcacaggcccaggttctgacaagcagagggtgaaaggtttcgttctaggcctgaagggccttacagggcagccagggcactacagcctctaaagtcccagcatctgggatcagggcactgtcccagcttcaaattcccagcatctgatcccctgggaggggccagggagcttttccttccctggaacgctgctgggaggtcatgagcctgcagaaggggtggcgggcaacccagtctggggctgggagggaggtcctgtggccagaggagacggtggaggggctgggggcaccaggcgtgctggaggcggagggcgggagatttggggaccaggctgcacagaacccgtcggaagcagggcgatcagccgggagctgcagaggcctggggggcctctagcccagggcagcctgggaggggcagctgcctgggcacccgggccccgcgaggaggggctggggcctgctgcggggtcgcagatgtgtcccggtgctcggagagggccgcagggcgcgtgggccgtggcgggaggccgcgctgctgggagctcacggcccccgccccccgtcccaggctcttcctcagccacccgcagaccaagacctacttcccgcacttcgacctgcacccggggtccgcgcagttgcgcgcgcacggctccaaggtggtggccgccgtgggcgacgcggtgaagagcatcgacgacatcggcggcgccctgtccaagctgagcgagctgcacgcctacatcctgcgcgtggacccggtcaacttcaaggtgcgcggggcgcggtgcgggcggggcgggacggggcggggcgcggtgcgggcggggcggggcggggcggggcggggaggggcggggaggggcggggtcgcggggcggatgcgggggtcgccgggcggggcccgggctaggccccgccccctcactgagccgcccccgcccccagctcctgtcccactgcctgctggtcaccctggccgcgcgcttccccgccgacttcacggccgaggcccacgccgcctgggacaagttcctatcggtcgtatcctctgtcctgaccgagaagtaccgctgagcgccgcctccgggacccccaggacaggctgcggcccctcccccgtcctggaggttccccagccccacttaccgcgtaatgcgccaataaaccaatgaacgaagcagcgtccacctggtctctgttgtccgtgggcggcgggcgcttggggaggcggagcgggaggagggcgccccggctgtctcggggccactgctgggccgcagggatccttgcaccgaccccagggtctctaagaggcagagggatgtgcagctcccggggcgggagcgggggtcactcgggacccaggcgtggtggagaaggggtgcagttaggcctttgcggaggggggagcagtgctggcgcccacccgccgcggctctccctgggacctccgtggtcttccttctttatttctcccgaatgtgtactatttcctgatttcagaacgatcaggacgaagaggggagggatgggcgtctgcgctcactcattccttcttccattcctcaatgaaacatttactgggcataagacagcctaggcatgtttctaggctatggataccgcagctgaaataaagaaagccctctgccccgtggggctgacaatctagtgggggatacagacgtgatgaagacagtcagatcacagttcacagaaatgagacaggaaaagaggctgagcctcactcataagagaaacgcaagttaaactacac

SEQ ID NO: 852 - DNA, 13943 bp, Homo sapiens
  source 1..13943: mol_type = genomic DNA
ttcagtaatgccagctccgactggggccggaggggcgggcaggcctagagtatcctggagacctgtagcccacgggccaggggcaaggcagcgacctcccgggctccactggatctggccggaaaaggttgcatttcctgagactagcatgaggctcacacttgggggctagcaccccaggccggccatttccagttggctaaaacagagcccctgagcctgctgagcaaagggcctgacctccacatgctcttataacaggaccatgagcccagcccggccttgcagggaaaggatttcctcaccgaggcctcgttaaaatgcacacactgcaggagcaaggactgccctagctgagggtatgggagggaggggaagaggggaggggacagagaggtaggagtgtagtgacactggttcttgttgtagcctccaggagcatatgagtgccaaagctaacaggagagcaggaacataaagcagcggaggtgtacaccgggcacacccctccaagtctctcactttgggccagccaaggaccccaaggccagcattttacttccccgaaatgactgtgggcttagagtcttccctaggtgatgaggggatgcttggatctggctctggccttgggagtgggagtggggccgtctttccatcaaggctggcagccgcttcccacccccagtcccgccagcccaccaaagtccactgacaggagttgtagagaaggcaagccgggtgagcacaacaccagaggagaagatcctaactggatcaacggactaggggagaaaagtgttgggggttaggggctagggaacaaccactgcattttggggaaaaatctgtggatactggaagtagaggcaagtcagcttctagttcactctgggctcctgacactctgaggatcctgacggccatagggccaggttcgccacttttgaggaggcagaattcagacaaggggccagttccagatccagagctgaatgggaagcgcgtgagtccccgacacggccgcttcagtggttagagtacaccggggactagtggcagcttctgcgacagggatggtgagcacccaaggcagactgggcgcgcaccataaacaccccacttgttaactgcgcggggcccaagggcccttctaagggaccccggtatggggctcacgtccgggtaggggcggggcgagcccaatggccaggccccccaccagccacgttggggcagcccccacagctcccggccttcgggccaaggtgtcggggtgcgtctcctggcccatcaatacagattacatatttatatcaatcgcgggctctgagggcgccctcggagagcggccccgcgcctacgaaaccaaactgggagtggtcgcgcggaaactctggctcgggattggctgcgggcgcccgccgcggtgcggggggattgctaatcgtattcagcatgttttgcacaagaaatgtcagccagaaagggctatctgctcccttcgccaaattatcccacaacaatgtcatgctcggagagccccgccgcgaactcttttttggtcgactcgctcatcagctcgggcagaggcgaggcaggcggcggtggtggtggcgcggggggcggcggcggtggcggttactacgcccacggcggggtctacctgccgcccgccgccgacctgccctacgggctgcagagctgcgggctcttccccacgctgggcggcaagcgcaatgaggcagcgtcgccgggcagcggtggcggtggcgggggtctaggtcccggggcgcacggctacgggccctcgcccatagacctgtggctagacgcgccccggtcttgccggatggagccgcctgacgggccgccgccgccgccccagcagcagccgccgcccccgccgcaaccaccccagccagcgccgcaggccacctcgtgctctttcgcgcagaacatcaaagaagagagctcctactgcctctacgactcggcggacaaatgccccaaagtctcggccaccgccgccgaactggctcccttcccgcggggcccgccgcccgacggctgcgccctgggcacctccagcggggtgccagtgcctggctacttccgcctttctcaggcctacggcaccgccaagggctatggcagcggcggcggcggcgcgcagcaactcggggctggcccgttccccgcgcagcccccggggcgcggtttcgatctcccgcccgcgctagcctccggctcggccgatgcggcccggaaggagcgagccctcgattcgccgccgccccccacgctggcttgcggcagcggcgggggctcgcagggcgacgaggaggcgcacgcgtcgtcctcggccgcggaggagctctccccggccccttccgagagcagcaaagcctcgccggagaaggattccctgggtaagcagggctgcagagggctgcagtcaggcgggcagacaggcagacacaaggaggagaaggatcagaaaactaggagcccgcgcagcagccggccggccttggcccaagctgcaggcaggctgaccttgtgaacttgctttttaatatttgggcgtggggacgcagtaaaattcatgtccggcttagcgccccacagcaagacgtcctcggcgctggcctcagctccccctgactagggacgaggacaccagcgagcaggccccctcctgtgcgctctttcctgtggccgggaggacccagagccctggtccctgcccagcctgcgcggcgcggcccacgcggggggagggggagggagggaaagtagctcgcccgcagatagcgcggatgtttgtaaggcatccaaaataagcagccgccagcgccaataaataagcccattaaccggcgaagttcgagtttacgatcccccatgcttttttcaaagttgctgaggggcgggaatcttcgttgcgggaagaagaaaaggcaaatccggcctggaagcggggggccctgagctgagagccagagaagggccatttcccttcccctggacctcggaatcgcccagctatctatccctggctcctggagaaacttgagggagggcccttgacccccgaatcggtttttcctgccttccccattggaccaatgatgcccttctttctccccttatcgagtcttgggcaatcagggccctggggtgagacagccaagctgcctggcccatcttccaagtaagcaccccgcgctcctagcctgggggctacaggaaatgcttgtctgccatatggcaagaggcaaagaaaagcgttaagttcaagatgtacagcctgccctcccaggcctttccttctgcaagcatctacggcttagcgctaaaacaggtgtttggaaaagtgggggaaatgtaaattggaagggtcatgtagattgaaggcccactcaatttttgtcatgacttttggaggaactgcttgctctcagcaagccaaaaacgggggcacgactctcttctctgtgacttgggacatctctcttatgggagaaacggaggcaattcacccccgcgggcagcccgtgtggcctcgacttaatcatcccctctttattctcttacatgccaggcaattccaaaggtgaaaacgcagccaactggctcacggcaaagagtggtcggaagaagcgctgcccctacacgaagcaccagacactggagctggagaaggagtttctgttcaatatgtaccttactcgagagcggcgcctagagattagccgcagcgtccacctcacggacagacaagtgaaaatctggtttcagaaccgcaggatgaaactgaagaaaatgaatcgagaaaaccggatccgggagctcacagccaactttaatttttcctgatgaatctccaggcgacgcggttttttcacttcccgagcgctggtcccctccctctgtcttcaggctctgcccaggaactcgcacctgtgctggagccctgttcctccctcccacactcgccatctcctgggccgttacatctgtgcagggctggtttgttctgactttttgtttctttgtgtttgcttggtgctggtttatttgttgttttctgggggaaaaagccatatcatgctaaaattctatagagatagatattgtcctaagtgtcaagtcctgactgggctgggtttgctgtcttggggtcccactgctcgaaatggcccctgtcttcggccgagctggtttcctgcccagcctggggcaaacctagccggaaggccgaggtcccattgttggcgctgaggtgtctggcctgaggtcaatggtgcaaaggagccgccaccgggcatgtctgcctggagtgctgtgctgtgtttaatcaggggatacaggcccctgggtttcttttttctttcttcctttcttccttggccaagagaagggcttacaggcatggacatgcaggttggcaaacgggcttgactttggctgatttaaaaagtgagaaagaaagtaaaaaaggttaatttttccttcctctgtaagatatcccagctttaaaaagaaaaaaaaagaattaccaagagaaggggacttctcttccagtttctgtaaggtcttacattgcctgactaaaatgtttcatttacctctaaatttccatatccttctggctgtagataaataatgtagttttgtttatgcatttggaattagtggatttttttgtcattaaaattgttaccactggtaacatgtgacaagcacaccacaattctccctatcttgtgaagttgtttttttaaatcgccttgaacaaaaagttttttttttgtttgtttttgctttctgaaattcacagaagcctaggaggactggggtaagcggaataaactagagaagggagacattgtttggatttcctttatactgtgaagttacatgcataaaagggtcaaacctgtagatgcagaaaaagaaaaaaactataaatacaaatctgtataaatgtctattattatgaagaattgccaatcttgttttaagcaaatgcattctatcgttattataaatgttagttctagctctatttacttctaatcttaaatcagaataaattaatattgtattgctgctgtgcgtggaaaaagacgatgtttatgttcttatagaataaaagctgtggaatgaagctttttaattttacctcttttttgacttcttatcttcaccttccactttatcccgttcaccacttttacaacaggaggactaacccgagcccctgcaattactttaggcatctatttaaatattacctagacggtcgtaatttgtctgggccctatagccctggtgccgtaaggtttgtcggcttttgttcagttttatggcttgctagtatatctggattgtggctgtcttggaccagtgatttcagttgagaggggagctacatagacagaggaagccaaacaggatttctttcgggagccccagggaggcttgcagaggccggttattttgcgggtgtctgggtcacagatgaccctcaatctgaatcggggagcaggcctggcccacagcgcatctctagccgctggaggcagcggttaggtggacccgggctggactgcatgggggcctccccctcccccagtacggcctcccccacctggcggcactccttagggccacgcgtttcctgcttgccagagtggggggggcgggggctaaggggagggggcgcaggagcgcgcgccccggcgggcgggcagctaggagggagagggggagagcgagaggcgggaggccggggccagacagggagccgggatctgtaccgtccctggcgctttcgagccttccacggctaccgcctcttggcgccggctcgctgggctgcaagatttgggaaagcggcgcgcacactgcttctcggagctgctctcgtctcgcctgctccccgcctttattcctctctccctgcctttcctccctctcttttcctccctctccctcccaggaataccttactggggcctgtggcttccccttccttgacgcatttgcggccgcctggggcactctgttgcactggcgggcgcaggttgcctaggggctgggctgggccgggccaggcgcgatggcagggttctctccttggcggcggcggcagcggcggaggcggcggcggcggcgggcgaggcagcccttcgcgggcagcaccagaactggtcggtgatttaggtagtttcctgttgttgggatccacctttctctcgacagcacgacactgccttcattacttcagttgaaatcgtctccaggtacctctgcgcgcgggggtcgggccgggcggggcatcacggccctggtcgtgccaggcctgcggtggcaacctcggctttccctgctcaggagcctcgtgtctttctccgcagcgctttgccagccggccggctttccccttccaccacacacctccacctggtcacagcaggtagggttaggttggctgctccttcgcggacgccgggggcgtggtaggaattctgggctttgggccattcaaggtcaggggcgcccgcttccatcctgagcctcccactggaggcctgcgcctgcccagggacctcctgccattctcttgtaaggctggaacacacacacacacacacacacacacacacacacacacaccagtcccgggtgtgagctcaggaaagaacctccttccagtggagactcaggctggactaggaaggatagggcaggctgggatcctggccttgtcacttacccttctctctgtaagctcggccgctgctaggagtcgcctctcttttcttccttcttttccctgtcttcccttcctcttttatctcttctttctttttttcttctttcctttgctccttcctgctttcttttcttccgttggtctttttttcatcttccgtctctgccagattctatctcacctccttatctccttcccaaagcatccttggggaggggcccagagctggcttcaggagagcctagggggtctcactttcctctgcggctcaagtagaggttgggaagtctgccgaggaagggcccgcgtggggcggctgccgagggcggtgggtttgggcctggtgtgttactctgcagacaaggcctcggttatgatcacgaccggatggcggcagccttgcgtttcttcgcctgtcgctaacggctgactaggagatctgattaggggacattcgctgcagctttgtgtgcccatatcgagggcagggaggccttcgccagcctcactggggactggagctgaggcccaaccagcctcgctggagcctggccattcgctgggaagctcttagctggctcttcccggcctgccggtcacagcttggggtttgaccgcattgagggagactggctagggcaaagcttgactgcttgcttactagtggcttccattaggtacaaaatatgttccatacagcacctttgtgcagctgggtgctggagaaggggacccttccaagagccagtatgttttaaatgggcaaaaagaatcccaaattccagagccattgatataaacttgagtcatcgttccaaattgtagtctacagatgggagccagtctgaccattttccctacagaaaacagaaaacaaactatctctccctactcccaacacacacagttacagattcgtgcccacaaagctgtttcctttccctgcctggactggaggcccaggaactctttcgttgcacagccaccgacctgctgtctgaaaggaccacacaccccattcccttcaactcctccctgccattttctggaccagggcattggatttatttcagagatcacagtttcagaaatctcagtcgagaaggggccgctttaaattatactcatttattatttctttatgcatacgcaatctctttcacttcgaaaataaaagcagacaaaaaagtcagactattctggctccaaacctttgggctgaaggaagacaatatttggttttctgatttttctccgctttctaggcaccagtaacatctgcttaacactcaacgcctgctaattgttcagtaactctcttattttggggctaaggctgtttaaaggaacagcttttttacttaaaaaatactgaaataatcagtgtcttctcaggcataaaacgtggaaaaggcatccagacatgcccagcccatttgcagacacttaaaattgggagccagggtttcctccagggttaattttttaaatgaaaatctcagaggcctggcggactgcggggtatttaggacacggtggactgtggtgggggtgggcatgacctagaggaatttatggggcaaggaaaatattagggggagggagatgaggcggacaggacggggccatttcggagttcattgtgtcggccacttccctcttccaggcgcgggtgcaggaaggggcacccagtcggtatccgcgcggcttggcagcctcgctggtatttgggagtcccagccggaagtgtgtcagggtgtttgagggggggattactggaactgctggtgaggatgaaggcaaaagagagagagagagatggaagcgcccgaggccgccagcctcgccgccagggaagtgggctaatgaaaaacacactgttgcaggcacagtatccacacgtgaatttgattacccctgttctaggagtcgctgctttctgttaggaattgggggcagggggagtttccttccaattaacggagtggcggcgaccttttaatttacccccaacgggtgagaaataaacttccccaacgtggccaggcccaggaatgggactggagtcgatgcccttttacccctccccgttctaatttccagccctggccttgagctgtggctgcctctctttgggccttgtacctctccgccgagtctccgggccccgtaggtaaccaaggcgaggcccggagtagcagctggaaagggaggaaggagccctgaaaggctcacgcggccccgggacaggccacatcggtgcgggcctcccaggttccggagctgcggggtctcttaggcgaggctgccttttcccaaaccgaacttgccttccattcatgccacttgtagttttttccccagctgggattcacggagcgcaaccaggcttgcagcgctcatggttagagcctctgaggctggagcacagggctgggtcgccagccgcctgcgcctgggaatcctgattgccagctgatgagaaaggcgggctgggcgcgcgtgtgcgtggggtcgagggccggggaccgagcgcgccgcacaaccaaccaggccctcaaaaccttcgccctggtggcggctggccgctccctcctggccagctcctccgtggggtcctcgtagcaaaggcgaatttaagggttgcccgggcgcccctcgctccaggcgggtagctgtggggacctacacccgcggtactccctgagcggccggtccctgcctggagtgccctggtagggccggcggcggctccgtttgggacggatcctgcgttgaatttgacttttcgagggcggccgcgggtaaactcgcctctcccggggaccgcagggattatttacagggagctcgccaaccaaacacaacagtctaacctttccaagtcctcgtaaatttttacagctgggagccacggcgaggcaaacgaatctgttggtcgtttccgacttcccgccagcctgtgtggcttctgaaacaataactccttatgaaatatcataaatatagatttaaatacagtagagcgacaatgcgatttggctgcttttttatggcttcaattattgtctaattttatgtgaggggctccgctggccgcactcgcacgcgggacccgcgccttcttgatggcgtgattaattgtgatataaaatagtccgcttaagaagtgtgtgtatggggggggagacgggagagtacagagacaaggctagatttgatcttttaatcgtcgttggccacaattaaaacaaaccccatcgtagagcggcacgatccctttacataaaaacatatggcttttgctataaaaattatgactgcaaaacatcggaccattaatagcgtgcggagtgatttacgcgttattgttctgctggacgggcacgtgacgcgcacggccaatgggggcgcgggcgccggcaacttattaggtgactgtacttcccccccggtgccaccaagttgttacatgaaatctgcagtttcataatttccgtgggtcgggccgggcgggccaggcgctgggcacggtgatggccaccactggggccctgggcaactactacgtggactcgttcctgctgggcgccgacgccgcggatgagctgagcgttggccgctatgcgccggggaccctgggccagcctccccggcaggcggcgacgctggccgagcaccccgacttcagcccgtgcagcttccagtccaaggcgacggtgtttggcgcctcgtggaacccagtgcacgcggcgggcgccaacgctgtacccgctgcggtgtaccaccaccatcaccaccacccctacgtgcacccccaggcgcccgtggcggcggcggcgccggacggcaggtacatgcgctcctggctggagcccacgcccggtgcgctctccttcgcgggcttgccctccagccggccttatggcattaaacctgaaccgctgtcggccagaaggggtgactgtcccacgcttgacactcacactttgtccctgactgactatgcttgtggttctcctccagttgatagagaaaaacaacccagcgaaggcgccttctctgaaaacaatgctgagaatgagagcggcggagacaagccccccatcgatcccagtaagtgtctcctcccttcaaatccgccgccgcctccacgccggcctcccggatctgctggcccgccaggtttctctcgagcctgccttcgtcctcgctggaagcctctcgagttggggccaggagccagaagttggtgtttgggacgcctcagatagggccccaagtctggagagcagtgaagagcggcccgcagggctacgggagaggaggcggctgctgcagcgagagggggcggggcgggcacttcgggacgagccaagactggccgcccctctccttggctgcccaggcccaggaccgagatactttgggccgttcttcgaaagcagtgcagcccagagagccttttgtacaactagattgtccgtgagcggcggcagccagggcagccggagctgggacgctgggggagacggccgattccttccacttcttgccttcggccagtggcggcgtaaatcctgccaagatgaggctgcgggcgacccgggccacaagggtccccatgacagattattcaaataagccacagacgtgatcagcggccttagggcgccctgacggcttgcccagctccgaaggccttccaggaaggttaaataaggagtggggggcgtagagggacaggttgggaaagaaagacgaagtcagtgaacgggacagaggaatcctaatcttgctacagaacacaaggcagcatgctttccctctgcgtggcaaggagacctgtttccaaatttcattctatacagcgttttgagagtgggaggaaggagaagggggacaagaggacagagtaggagaaaggaaggtctcggaggggagggcgagccaaagttttactgcgtgcaattttaagtgactgtctgtgcgtctgtctgccagggttccattgtgtccgaggcctgactgcctttcctaaccagttcagcagagttctgcacttcggccagagaccccatgcaggaggctcatttgccccagcgggatgtgcgtcttctgctcctaaacccagtgtttctcttccccgcagataacccagcagccaactggcttcatgcgcgctccactcggaaaaagcggtgcccctatacaaaacaccagaccctggaactggagaaagagtttctgttcaacatgtacctcaccagggaccgcaggtacgaggtggctcgactgctcaacctcaccgagaggcaggtcaagatctggttccagaaccgcaggatgaaaatgaagaaaatcaacaaagaccgagcaaaagacgagtgatgccatttgggcttatttagaaaaaagggtaagctagagagaaaaagaaagaactgtccgtcccccttccgccttctcccttctctcacccccaccctagcctccaccatccccgcacaaagcggctctaaacctcaggccacatcttttccaaggcaaaccctgttcaggctggctcgtaggcctgccgctttgatggaggaggtattgtaagctttccattttctataagaaaaaggaaaagttgaggggggggcattagtgctgatagctgtgtgtgttagcttgtatatatatttttaaaaatctacctgttcctgacttaaaacaaaaggaaagaaactacctttttataatgcacaactgttgatggtaggctgtatagtttttagtctgtgtagttaatttaatttgcagtttgtgcggcagattgctctgccaagatacttgaacactgtgttttattgtggtaattatgttttgtgattcaaacttctgtgtactgggtgatgcacccattgtgattgtggaagatagaattcaatttgaactcaggttgtttatgaggggaaaaaaacagttgcatagagtatagctctgtagtggaatatgtcttctgtataactaggctgttaacctatgattgtaaagtagctgtaagaatttcccagtgaaataaaaaaaaattttaagtgttctcggggatgcatagattcatcattttctccaccttaaaaatgcgggcatttaagtctgtccattatctatatagtcctgtcttgtctattgtatatataatctatatgattaaagaaaatatgcataatcagacaagcttgaatattgtttttgcaccagacgaacagtgaggaaattcggagctatacatatgtgcagaaggttactacctagggtttatgcttaattttaattggaggaaatgaatgctgattgtaacggagttaattttattgataataaattatacactatgaaaccgccattgggctactgtagatttgtatccttgatgaatctggggtttccatcagactgaacttacactgtatattttgcaatagttacctcaaggcctactgaccaaattgttgtgttgagatgatatttaactttttgccaaataaaatatattgattcttttctattttttgcgggtctgctctttgcaccttcttctctgggtcaggggagcctatgtagagtctctgggtaggggcgggttggggtggtgagaaagagccccaattttgcctctggctggctttcaggagcgggacctgccacaaccagtccgccgagctaagctctcccaaacaggccagctgcctggcggcgagaaaaagctgggaaacccggcggaggagccaggctcccggccttgtgtctatgtgcgggacggcggagaagcccctgaggagctggtctggtctggccagtagcagtggaaagaccactctcaccttggtgcccccgagaaaattcccaaacctgggccttcgttagcttggtgaggaaaagggggagagggtgacaggatagagagctgggagccgccttctaagcaggctctgaagagggaaataggagccccaccggcccaacgtggccatgcaggcaaacattttgggggcttgcaaaggaacaaagccctgcatcctcgcaccgcccgccacccccgcggagtcctgccagcctggcccaagagaatctgggtcctgcactgcaagcacctctcgagcacaag

SEQ ID NO: 853 - DNA, 3980 bp, Homo sapiens
  source 1..3980: mol_type = genomic DNA
ggcttcctcctgctgcagggctgagaccctgggaggtcccaacccaggcaaattgaacgccaggctaatttgaagacccaactcccagccctccccttcaccggaggacagagctctagctggcctgggcccccacctgatagcagcctccaacgtctggggtgtctgataatgcttggcggggagctcgtgccaagtcccgccatcagcacggttgttgctgtttactggggagggggagggctgtggagcctcaatcagggggacagggggtcccacagcttcttcccagaataccctttctgccttttccaggaaagttaactgagggaagacccccaagtctctccttctttggagacccaatgtctgtttttacccagcacctggaccctcaaaccctgaaccccccaacccttgatatttgacttggctttggacacagggttagtctttaaccccagccccagacaggccaacgtgaagtttgtgccccagaaacagtgcccccccgccgccttgccttgctttgccttatcagaggctgcagccaatcagctaaggacagagaggagccctcgaaggggctatcacagcctcagagttcacgaggcagccgaggaagaggaggcttgaggcccagggtgggcaccagccagccatggccacagccgagaccgccttgccctccatcagcacactgaccgccctgggccccttcccggacacacaggatgacttcctcaaggtggggcctagaaggtggggtctaggtgggctggctggaatccagggccacagtcacagatcttggggtccagacctgcatcttgacctgaaatcaagagacttaaccaggactgaggtacgctcagtccaggagaggagatctcagcttagtctggcagggggtgaggagggtggtctaggggtttgaggttctaagtgtgatctatttcggtaatagaaaacgaaggtagcctgggcaacatggtgaaaccctatctctacaaaaaataccaaaaacattaggccaggcatgggggcgtgtgcctgtagtcccaggtactccgtaggctgatgcaggaggatcattagagcccaggagattaaggatacagtgagctgcaccactgcactccagcctgggcaaaagagtaagaccctatctcaagaaaaaaaaaaaaaaaaaggaacgagatctaggctcacagacaatcttccagatatcagcgggaaatgatgagtgtgtctgggggacatccaaaatttcggaattaatcttgttttgggagacagggaaggagagggatgttctgggggaaaactaagtcaaggctggcatcctctcccccgtcccctgccagttttccatctccagcagctctgctaccccttcccccatccccgagtgtggttccagatagtggaagtcttatctcctgtctccagccagacctgatcggtttctgtccctggagctggggggggagcggggagaggggcggttagaggggcagtgttggggaagtgggacagacagacaggcaaacaagacccctttccaaagcctctgcgtcagagtgtccagcccgcgatgtccctgggcagggcaccccagtgtccaccgaacctcgagctgcctgctccctcccgcagtggtggcgctccgaagaggcgcaggacatgggcccgggtcctcctgaccccacggagccgcccctccacgtgaagtctgaggaccagcccggggaggaagaggacgatgagaggggcgcggacgccacctgggacctggatctcctcctcaccaacttctcgggcccggagcccggtggcgcgccccagacctgcgctctggcgcccagcgaggcctccggggcgcaatatccgccgccgcccgagactctgggcgcatatgctggcggcccggggctggtggctgggcttttgggttcggaggatcactcgggttgggtgcgccctgccctgcgagcccgggctcccgacgccttcgtgggcccagccctggctccagccccggcccccgagcccaaggcgctggcgctgcaaccggtgtacccggggcccggcgccggctcctcgggtggctacttcccgcggaccgggctttcagtgcctgcggcgtcgggcgccccctacgggctactgtccgggtaccccgcgatgtacccggcgcctcagtaccaagggcacttccagctcttccgcgggctccagggacccgcgcccggtcccgccacgtccccctccttcctgagttgtttgggacccgggacggtgggcactggactcggggggactgcagaggatccaggtgtgatagccgagaccgcgccatccaagcgaggccgacgttcgtgggcgcgcaagaggcaggcagcgcacacgtgcgcgcacccgggttgcggcaagagctacaccaagagctcccacctgaaggcgcatctgcgcacgcacacaggtgagggggcggggccccggacatgagaaagggcgcggcgcccgctgtagttacaggggaagaagggttgcagagggcgggacttggacttggctggcctctgagagtgagtgcctccttaaattttgtgccctaggggcctcactttgttcatcctagtcccagcccaggctgagtaaaggggtgtggccagatgcaggggacccggggacatgactgggcagacagtggcgcttatggcttccttgtcccctaggggagaagccatacgcctgcacgtgggaaggctgcggctggagattcgcgcgctcggacgagctgacccgccactaccggaaacacacggggcagcgccccttccgctgccagctctgcccacgtgctttttcgcgctctgaccacctggccttgcacatgaagcgccacctttgagccctgccctggcacttggactctcctagtgactggggatgggacaagaagcctgtttggtggtctcttcacacggacgcgcgtgacacaatgctgggtggttttcccacgaatggaccctctcctggactcgcgttcccaaagatccacccaaatatcaaacacggacccatagacagccctgggggagcctcttacggaaaatccgacaagccttcagccacagggagccacacagagatgtccaaactgtcgtgcaaacccagtgagacagaccgccaaataaacggactcagtggacactcagaccagctcccagatggccctggacagcaggagagggtgtgggatgaggcttcccagagaccctgggtctagaaagcggctcctgaaggtcccttattgtggctgatattaactgtcaatggttatgggtcctataaaaatgcccctcccagataaagcttcagcgttggcctgaatttttgggttttggaggctggaagatggcaggaggctgtaaacctagaggtcatattagagggccttacacaccctcatctcctaaactacagtgacacccctcaactccaacaagcccccttgggcactggaggccttgctgtcctctcttttcccacccagttcaggctacactgtccttgtcttctgccttgaaccctgcggacattgacagcaaacatctccctggatttaagagttcacagcctatgactgcccagggggttcatcttgcccactgtccagatagagccaatttatcgagacagagggattgcaatagagagagtttaatccacatacatccagctaaatgggagatgggagttttattacttgaatcagcctccctgaaaattcagaggctagggttattcaagaacagtttggtgggcaggagggctagggaatgggtgccttgctgcaatcctggagctgtggaaaacagttgctgagtcagcttctgggtggggaccatagagtcgctagtctgggtggagtcatccagttgtcagatatgcaaaaagcctaaaaagacatc

SEQ ID NO: 854 - DNA, 6461 bp, Homo sapiens
  source 1..6461: mol_type = genomic DNA
gttgtttccgtttacagagaacaataatattgggtggtgagcatctgtgtgggggttggggtgggataggggatacggggagagtggagaaaaaggggacacagggttaatgtgaagtccaggatccccctctacatttaaagttggtttaagttggctttaattaatagcaactcttaagataatcagaattttcttaaccttttagccttactgttgaaaagccctgtgatcttgtacaaatcatttgcttcttggatagtaatttcttttactaaaatgtgggcttttgactagatgaatgtaaatgttcttctagctctgatatcctttattctttatattttctaacagattctgtgtagtgggatgagcagagaacaaaaacaaaataatccagtgagaaaagcccgtaaataaaccttcagaccagagatctattctctagcttattttaagctcaacttaaaaagaagaactgttctctgattcttttcgccttcaatacacttaatgatttaactccaccctccttcaaaagaaacagcatttcctacttttatactgtctatatgattgatttgcacagctcatctggccagaagagctgagacatccgttcccctacaagaaactctccccggtaagtaacctctcagctgcttggcctgttagttagcttctgagatgagtaaaagactttacaggaaacccatagaagacatttggcaaacaccaagtgctcatacaattatcttaaaatataatctttaagataaggaaagggtcacagtttggaatgagtttcagacggttataacatcaaagatacaaaacatgattgtgagtgaaagactttaaagggagcaatagtattttaataactaacaatccttacctctcaaaagaaagatttgcagagagatgagtcttagctgaaatcttgaaatcttatcttctgctaaggagaactaaaccctctccagtgagatgccttctgaatatgtgcccacaagaagttgtgtctaagtctggttctcttttttctttttcctccagacaagagggaagcctaaaaatggtcaaaattaatattaaattacaaacgccaaataaaattttcctctaatatatcagtttcatggcacagttagtatataattctttatggttcaaaattaaaaatgagcttttctaggggcttctctcagctgcctagtctaaggtgcagggagtttgagactcacagggtttaataagagaaaattctcagctagagcagctgaacttaaatagactaggcaagacagctggttataagactaaactacccagaatgcatgacattcatctgtggtggcagacgaaacattttttattatattatttcttgggtatgtatgacaactcttaattgtggcaactcagaaactacaaacacaaacttcacagaaaatgtgaggattttacaattggctgttgtcatctatgaccttccctgggacttgggcacccggccatttcactctgactacatcatgtcaccaaacatctgatggtcttgccttttaattctcttttcgaggactgagagggagggtagcatggtagttaagagtgcaggcttcccgcattcaaaatcggttgcttactagctgtgtggctttgagcaagttactcaccctctctgtgcttcaaggtccttgtctgcaaaatgtgaaaaatatttcctgcctcataaggttgccctaaggattaaatgaatgaatgggtatgatgcttagaacagtgattggcatccagtatgtgccctcgaggcctcttaattattactggcttgctcatagtgcatgttctttgtgggctaactctagcgtcaataaaaatgttaagactgagttgcagccgggcatggtggctcatgcctgtaatcccagcattctaggaggctgaggcaggaggatcgcttgagcccaggagttcgagaccagcctgggcaacatagtgtgatcttgtatctataaaaataaacaaaattagcttggtgtggtggcgcctgtagtccccagccacttggaggggtgaggtgagaggattgcttgagcccgggatggtccaggctgcagtgagccatgatcgtgccactgcactccagcctgggcgacagagtgagaccctgtctcacaacaacaacaacaacaacaaaaaggctgagctgcaccatgcttgacccagtttcttaaaattgttgtcaaagcttcattcactccatggtgctatagagcacaagattttatttggtgagatggtgctttcatgaattcccccaacagagccaagctctccatctagtggacagggaagctagcagcaaaccttcccttcactacaaaacttcattgcttggccaaaaagagagttaattcaatgtagacatctatgtaggcaattaaaaacctattgatgtataaaacagtttgcattcatggagggcaactaaatacattctaggactttataaaagatcactttttatttatgcacagggtggaacaagatggattatcaagtgtcaagtccaatctatgacatcaattattatacatcggagccctgccaaaaaatcaatgtgaagcaaatcgcagcccgcctcctgcctccgctctactcactggtgttcatctttggttttgtgggcaacatgctggtcatcctcatcctgataaactgcaaaaggctgaagagcatgactgacatctacctgctcaacctggccatctctgacctgtttttccttcttactgtccccttctgggctcactatgctgccgcccagtgggactttggaaatacaatgtgtcaactcttgacagggctctattttataggcttcttctctggaatcttcttcatcatcctcctgacaatcgataggtacctggctgtcgtccatgctgtgtttgctttaaaagccaggacggtcacctttggggtggtgacaagtgtgatcacttgggtggtggctgtgtttgcgtctctcccaggaatcatctttaccagatctcaaaaagaaggtcttcattacacctgcagctctcattttccatacagtcagtatcaattctggaagaatttccagacattaaagatagtcatcttggggctggtcctgccgctgcttgtcatggtcatctgctactcgggaatcctaaaaactctgcttcggtgtcgaaatgagaagaagaggcacagggctgtgaggcttatcttcaccatcatgattgtttattttctcttctgggctccctacaacattgtccttctcctgaacaccttccaggaattctttggcctgaataattgcagtagctctaacaggttggaccaagctatgcaggtgacagagactcttgggatgacgcactgctgcatcaaccccatcatctatgcctttgtcggggagaagttcagaaactacctcttagtcttcttccaaaagcacattgccaaacgcttctgcaaatgctgttctattttccagcaagaggctcccgagcgagcaagctcagtttacacccgatccactggggagcaggaaatatctgtgggcttgtgacacggactcaagtgggctggtgacccagtcagagttgtgcacatggcttagttttcatacacagcctgggctgggggtggggtgggagaggtcttttttaaaaggaagttactgttatagagggtctaagattcatccatttatttggcatctgtttaaagtagattagatcttttaagcccatcaattatagaaagccaaatcaaaatatgttgatgaaaaatagcaacctttttatctccccttcacatgcatcaagttattgacaaactctcccttcactccgaaagttccttatgtatatttaaaagaaagcctcagagaattgctgattcttgagtttagtgatctgaacagaaataccaaaattatttcagaaatgtacaactttttacctagtacaaggcaacatataggttgtaaatgtgtttaaaacaggtctttgtcttgctatggggagaaaagacatgaatatgattagtaaagaaatgacacttttcatgtgtgatttcccctccaaggtatggttaataagtttcactgacttagaaccaggcgagagacttgtggcctgggagagctggggaagcttcttaaatgagaaggaatttgagttggatcatctattgctggcaaagacagaagcctcactgcaagcactgcatgggcaagcttggctgtagaaggagacagagctggttgggaagacatggggaggaaggacaaggctagatcatgaagaaccttgacggcattgctccgtctaagtcatgagctgagcagggagatcctggttggtgttgcagaaggtttactctgtggccaaaggagggtcaggaaggatgagcatttagggcaaggagaccaccaacagccctcaggtcagggtgaggatggcctctgctaagctcaaggcgtgaggatgggaaggagggaggtattcgtaaggatgggaaggagggaggtattcgtgcagcatatgaggatgcagagtcagcagaactggggtggatttgggttggaagtgagggtcagagaggagtcagagagaatccctagtcttcaagcagattggagaaacccttgaaaagacatcaagcacagaaggaggaggaggaggtttaggtcaagaagaagatggattggtgtaaaaggatgggtctggtttgcagagcttgaacacagtctcacccagactccaggctgtctttcactgaatgcttctgacttcatagatttccttcccatcccagctgaaatactgaggggtctccaggaggagactagatttatgaatacacgaggtatgaggtctaggaacatacttcagctcacacatgagatctaggtgaggattgattacctagtagtcatttcatgggttgttgggaggattctatgaggcaaccacaggcagcatttagcacatactacacattcaataagcatcaaactcttagttactcattcagggatagcactgagcaaagcattgagcaaaggggtcccatagaggtgagggaagcctgaaaaactaagatgctgcctgcccagtgcacacaagtgtaggtatcattttctgcatttaaccgtcaataggcaaaggggggaagggacatattcatttggaaataagctgccttgagccttaaaacccacaaaagtacaatttaccagcctccgtatttcagactgaatgggggtggggggggcgccttaggtacttattccagatgccttctccagacaaaccagaagcaacagaaaaaatcgtctctccctccctttgaaatgaatataccccttagtgtttgggtatattcatttcaaagggagagagagaggtttttttctgttctgtctcatatgattgtgcacatacttgagactgttttgaatttgggggatggctaaaaccatcatagtacaggtaaggtgagggaatagtaagtggtgagaactactcagggaatgaaggtgtcagaataataagaggtgctactgactttctcagcctctgaatatgaacggtgagcattgtggctgtcagcaggaagcaacgaagggaaatgtctttccttttgctcttaagttgtggagagtgcaacagtagcataggaccctaccctctgggccaagtcaaagacattctgacatcttagtatttgcatattcttatgtatgtgaaagttacaaattgcttgaaagaaaatatgcatctaataaaaaacaccttctaaaataattcattatattcttgctctttcagtcaagtgtacatttagagaatagcacataaaactgccagagcattttataagcagctgttttcttccttagtgtgtgtgcatgtgtgtgtgatgtatacaaagagagagataattgtatttttgtattttcttttaaataatttttaaaattgacccttttcctgagacaaattgccagaatagtttgtatttagagatggtacctctaagagtaaggttgctggttgctgagcaattgacttgaaaacttttaaaattcaaattttaattccactactcaaaagaattgccatgttttaaaaaagagaattggtgccataagttagttgtctatgtttgaaaatgaagaagatatgcaacgtcatggcctggtcacttacccgcagccctgagttgtaggcacatcatatgtgagaatgaggatgcttttctttcatttaaaatccctccccaaaacttggctctaattgcagtcatgacaatcatgtacatttggatttatgtgcacgagtctcttaccctgagagaggacaggtgctacaggtggaggggacccgtctgggtcacgttcacat

SEQ ID NO: 855 - DNA, 20470 bp, Homo sapiens
  source 1..20470: mol_type = genomic DNA
agcctggccaacatggtgaaatcccgtctctactaaaactacaaaaattagccgtccgtggaaccagctacttgggaggctgaggcataacaacttgaacccgggaggcggaggctacagtgagccaagatcgcgcctctgcactccagcctgggtgacagagaccccgtctcaaaaaaaaaaaagctactggagggaacttgggggcgtggaaggggtggtcacgggggaagtcccccagatttggacgctcgtaaaaagctcggaagctgggagaccaggagggcggggaagtcgaggtccagtcactgggccagagtccccaagacttgggctggagaaaggtcggaggaaaggaccccactagtccgaaagcatgtccccgcgcacgcgcaccaggcggccggcagagacagggcacagtaaaaggagccgcgcggactccgggcacagctgctgggcactggcagctcgcaaggcacagcgcgcaggcgcgcacgccacttaaggccccgccccctcccagcgcgctgattggcggggccgtagaggggcgggggcatggcgccgcggctgcgcagcgcggggccccgcgcgggcgggtgggcggagcgggccccccgagcgggggctggcgagcgcggggagggggccgaaagggcggcaaagccggcgcgcgcccggctgggggcggagggcgggggcccgcgggccggaacagccgcggcaagtggcggcggcggcagcggcagcggaggcagctgaggcggcggcggcgagtgggggtccgggcggcggcggcgggcccggcggcgggccgaggagccgggcgcaatggagcggaagaggtgggagtgcccggcgctcccgcagggctgggagagggaagaagtgcccagaaggtcggggctgtcggccggccacagggatgtcttttactataggtgaatgagcgcgccggccgcgcagggcctcaacgggctcctcccagcggcctctgcggcggcctcggcgcccctgccccgggccgcggcctgggccccgcgcgtgcgtcgtgcgtgcgtgcgtgcgtcttgcgtgcgtgtgcgcccggcgcgcggaggcccagtgcgcgtgcgccgcttgttgggccgcatggctttcggccggccgttcagggactggctgccggacggcgactgcggcctttgttcgtgcgcgctgggccaggggcgcctggcggcggccagatgctaccggggggcaggggtggagggtgggctgtccctttggttcccgtgagacgcagggggtgccttcttggggcgctcctggggtggcgcggagcccgagggggtggccagccgggatttcggggagcagggctcatgggcggatcggggagggcgtgcgtgaaaatacgggttcttgggctcgccccagtcctgggaataagcgcctcagggtgactggtctcccacgcagcgttgctttttttaaaggtattccccttgactccttccgaggcctctggtcctcttgggtcgtggccccctcagggtggagacctgaggctttcgactttccgagcccacctaacggtagtctttgcgtggatgttactggtggtggaaggctttcagagacccccccgtccccaaattggaacaaggcgctgctctgaaaggtcgcagggaaccccctccgtggaacaaagacttagtcgcctgctgcagccaagtcccagacagtcggccacctgctgtttgtcctcttttttttttttttcctggctcgggaaagatgcttttgattctgggccagctttgattgcgccctccccttggttcagtgtcccgtggcgccttcaggtcccccaggaggggaaagcggaggacgcctgccatgtgccgagcacctgggtaaaggggggtgtgcggctggtccccctttttcccacagctcggggtcgtgggcaggagaccgcccaggtgagggcgggtggtttccacgagccaaggaggggcagaacgaccgctccgtccactgtgcacttcggtcctctgtggttcttgactgtcccggtttggggagataaagtgagaaaagtgagcggggaaaggatggctgtgatcagaagcaatgtgtggggcctcgtcctgcaggaggagctcagggactggttcctggaaagttggaggacagcaagagaggggaaacttggtccccaaatgtgtacccttatgagctggaaccctgtacacgtcctgagatctgcagtgacacatgctgaaatctgggagggcagatgacggggcctgaatgagactggggtcagggagggcttctctgaggacgtgacattgagtgacagggagaggcgtccaggcagcaggaaccccctaagaggtggctgcagcttgggagctagaaccaaggccagcttgagcggagtatcctgaggctgtcatcaccccacctctctcattcccactctgggccctggccctgagcatgagggtctagcagtggagaaaagcagggagaagctcctctacaggctagagatttcaggtttctctgcagagggtgaagccaggcagcccagagccgccctctgcaggtctggggcctcaacccagcccttcatctgaggctgcaggctcccagactgcgttttctgttgggggtgcctggggagagttcaggccatgttgcccacttttttctatacgtgtggttttatcaaggctgttcttttttcattgaataaaatctcagggacatcattttgtgtcaatagatgggcataacctttatttaaaattgagatataattcacattccacaaaagctaccttttttgttttttttctttgagacagggtctcacccaggctggagtgcagtggtacaatcacggcttacgcattcttgacctcccaggctcaggcgaccctctcagctcagcctcccaagtagtgggaattacaggcacgtgccaccatacctggcttatttttatagagatggggttttgctgtgttgcctagactagactggtctcgaattcctggactcaagcagttaacccgcctcagcctcccaaagtgctgggattacaggcatgagccactgcctggccaaagccactttttagaaatgtacaattcagtggggtttttttttggagatggagtttcactcttggcccaggccacagtgcagtgacgcaatcccagcccactgcaacctccacctcccgggttcaagcgattcttctgcctcagcctcccgagtagctgggattacaggcgtctgccaccatgcccggctaatttttgtatttttagtagagaaggggtttcgccatgttggccagactggtctcgaactcctgaccccagcacctcagcctcccaaagtgctgggattacaggcctgagccaccacacccggcccccagtggtttttagtacattgacaaagttgtgcaaccatcaccgctatctaattccagaacattctcatcaccctgaaaagcagctctgtcctcattagcagtcactccccacttgttactcccccagcccctggtaaccactaaccccctctatcttgcatttgcattcattcattcatttattcattgtgagacagggtcttgttctgtcacccaggctggagtgcagtggtgcagtcacagctcactgcattccttgacctcctgggctcaagcgatcctgcctcctaagcctccagcatagctgggactacaggcatgtgccaccatgcccagctaattttttatgttcattattatttatttattttgagaagtagtcccgctttgtcacccagggtggaatgcagtggtgcaatctcggctgactgcagcctccacctcctgagttcaagcgattctcctgcctcagactcctgagtagctgggattacaggcccccaccacaacccccagctaatttttatatttttaatagagacggggtttcaccatgttggccaggctggtcttgaactcctgacctcaggtgatctgccctccttggcctcccaaagtgctgggattacagatgaaagccactgcgcctgccttcttttttttttttttttttttttttgagaccgagtttcgttcttgttgcccaggctagagtgcaatgttgcagtgcaatgctgcaatctgggctcactgcgacctccacctcctgagttcaagcaattctcctgcctcggcctcccagctagctgggattacaggcatgtgccaccacgcccggctacttttgtatttttagtcgagatggggtttcaccatgttggtcaggctggtctcgaactcctgatctcaggtgattggccctcctttgcttcccaaagtgctgggattacaggtgtgagccactgcatttattctttttgagaaggtgttatcgagatacagttttatgtaccatacaatacagtcatttaaagtgcacgagtcaatggtttttcagcatattcacatatttacggatataggcagctatcctcagattcaattttagaatttccatcaccctagaaagaaccccaggcccatttaccactgccttgtgcgcccacccccagtcttaacaaccaggctgtggtctgtgtgtgtctcttgttcgccttacaccttttttttttttttttttttttggagacacagtcttgctctgtcgcccaggctggagtgcagtgtcatgatctcggctcactgcaacctctgcctcctgggttcaacccaattctgcgtcagcctcccgagtagctgggactataggcacgtgccactgtgcccggccaattttttgtattttagtagaaacgggtttcaccatgttgcccaggctggtctcgaactcctgagctcaggcaatccacccacctcagcctcccaaagtgctgtgattacaggcgtgagccaccgcgcccggccttgtttcccttcatcttaaaaggcagaacggcctctctttggggtgaccggaggcaaagagctgttgggagtgttttgtggggtctcttcttccttccttgtggctacatgaagcctgagtctcagcctctggtttcttggtttctttccactgccctgggcaaaccagcttcgactgaacgtcagccagtccagagagtaattaaaagagttaagtctcaaaagtaaatctccgggaagagccctcagtggtttcagacccccaggcacttgtcctcgtgccctccctgaggcgtcctgtcctactggacatgctggagcctgcccgtgtccttgtggaccatggaatttgcccggggttggggggcaggggtggagagaaataaaacttcctgtgatctatgtatcggcccagtacatagatcctggatagaggcgattgagctaagcatgggaccaagcatttctgtgcagtgcctgcagaattgagtttccttctggctatgggagattcttctgagctgtctcagttgtctgacatctggcatctgccatgggccaggacgtctggggcaggggcagaagaggacaggaggagactgccctagaggattctgggaaaacgggaaaacagcaaaacagagctacccaccaatctcaggctgatgcattattaataaaagtgactgttgactgagtttgtagacataatatgtttgaggtacctggcctagtaagcaccatacaagtgctattatttctaaatgattttatcaagataaaagacaccagccaggcatagtggctgccgcctataatccctttgggaggtcgaggcaggaggatctcttgagatcgtaagttggagaccaacctgggcaacatagcgagtccccatctatgcaaaaaatttaaaaattagctgggcatggtggtgcacacgtgtagtcctagctcctcaggaggccaaggcaggacaatcccttgagtccaggaggtcaaggctgcagtgtgctgtgatcacaccactgcactccagcctgggcgacacaaggagaccctggatctaaaagtaaaaatgaaaaaaaaaagaaatgaagcagcagggcgtgatgactcacctttaatcccaaagctttgggagggaagatgggaggactgcttgagctcaggagttccagaccagcctgggtaacatggtgagaccctatctctattaaaaaaatataaaaattggctgggcgcggtggctcacgcctgtaatcccagcactttgggaggccaaggcagccagatcatgaggtcaggaggtcgcgaccatcctggctaacactgtgaaaccccacctctactaaaaatataaaaaattagccgggcgtggtggtgggcagctgtagtcccagctactcgggaggctgagtcaggagaatggtgtgaacccggaagtcggaggttgcagtgagccaagatcgcaccactgcactctagcctgggtgacagagcgagactccgtcttaaaaaaaaaaaaaattaggccgggcacggtgactcacacctgtaatcccagcactttgggaggctgaggcggacagatcacctgaggtcaggagttcgtgaccagcctggccaacacagtgaaacctggtctctactaaaaatacaaaaatcagccaggtgtggtggcgggcacctgtactcccagctactcaggaggctcaggcaggagaatcacttgaacctgggaggtggaggttgcagagagccaagatcgagccacttcactccagcctgggcgacagagtgagactccatctcaaaaaaaaaaaaattaggcgtggtggcttgtgcctgtcgtcctagctacttgggagactaaggtggaaggatcaccctagcccaggagttcaaggttgcagtgagctgtgattgagccattgcattccagcctgggcaagagtgagaccctatctccaaaaggaaagagagaaacgaagtcctgtccctatcagcagccactccacatcctgcaccccagcctctggcactacgcgtccccttcctgtctctgaattatcctgttctagacatttcttagaaatgggatcacacactgtgtggccttttgtgtctggcgtctctcactgaatgtggcgtcctcaaggtgcatccacgctgtggcctgtgtcagagcctcgctccttttcatggctgagtatgtcccatcgtgtggatgggcgtttgtccgttcatccattgaaggcgtctgggctgcttccaccttctggctcctggggacatccgtgtagaagtgatggtgtggatgcgtgctcatttttcgggcagatacctaagagtggcgtggccgggtcatctggaaactcagtgaagagctgtcaggcttttccaacatggctgttccatcttacatcccaaccatgatgacggtgtgttgggttgggtgcttgtcatcctgtagtgtgacctcatgtgacacacagggcaacccattggtgggtgtccttatgtcctggagaggatgagttgccggcgcttgtccatggcaggctgagagcagagccccgtgtctgagagcaggtctgtgtttacctggctgccttgttgcgagctctccagtcgggttatgcccaagcagctgttagggcctggccccagatcttagaacgagaccccttcccagtctggccctgctgctgtaaccccaaggtggaagaagattgcttttagggctgtccctcacatacctgttctccgtggggtcttttctcaagaatgtgacctaaattccatgtctggaatgttctggacatgtgagccatcctcccagagccggggcccaaagccctgtaggtagtagcgtttgtacccgaactcagcgtctgctgtgcctgacgctgccagggcctacggtggggaggattcagaggggaccggggttgggggtctggagcaaggatccgatgtggaggctggggctagggccagggtgtgaggatcggggccagtgctctgggtctggctggcgcccagatctaggggccagttgtggggtgctggggtctgggatgaaggtctggggtcacgccagggttggggtctggggctggggccagggcctgcctgggtttggggtcagggccgtgttggggtctggggctggggtcgcgacctgaagctggggctgggactgggtttgggtctgcggccgaggcctgggtttggggtctggggtccgcccggggcgccgaccgtcccgcctccccgcagcccgagcgggaagaagttccgcagcaagccgcagctggcgcgctacctgggcggctccatggacctgagcaccttcgacttccgcacgggcaagatgctgatgagcaagatgaacaagagccgccagcgcgtgcgctacgactcctccaaccaggtcaaggtgagtggtggcgtcacgcaggtgacgtcggcgcggggcgttctaggcggggacgcggccatgacgtgagctgcaggcgacacagcccggcgtcctgagcgcaggaggtcacagcgggcggagggcacagagcggaaggcgcaggccacagggtgcagagcgcaaggcgcatggcgaggacgcggcccgcggcgggcgttccagagccggccggaccgaccctgcgggagcggcctccccggaccgtgggggtcctggcgggcgcgggggacacgaggggcgccggcaaagcagggggtcacccgggccccgcaccccctgaggctccgcgccgccggggcgcccccaggccggactgcatatccttcctcccgcagggcaagcccgacctgaacacggcgctgcccgtgcgccagacggcgtccatcttcaagcagccggtgaccaagattaccaaccaccccagcaacaaggtcaagagcgacccgcagaaggcggtggaccagccgcgccaggtgagctcaacgcacagcgaccccagccttcccggccgggttgttcactttggtgggtggacgtttggaatgaggtcgtacgtggagcggacgtagtgagcgcaggagttccaggctagcctgggcaacatgacgaggcaaaaaacaagtaaaaaattagctggacgtggtggcgcccgcctgtggtcccagcttctggggaggctgaggtgggaggattgcttgagcccaggaggctgaggctgcagtgagctatgatcacaccactgcactccagcctgggggcagagcaagacccagtcctgcggtcccctcttggaatgtgcagggtattggtgccaggatacgccccaccctcaacccccagataccaaaatctggggatgttcaggcccctcagaaaatggtctagtatggcctcacgcggtgactcacgcctgtaatcccagcactttgggaggccgaggcaggtggatcacctgagaggtcaggagtttgagaccaggctgacccaacatggtgaaaccccgtctctactaaaaatacaaaaattagctgggcgtggtggtgtgcgcctgtaatcccagctacccgggaggctgaggcaggagaatcacttgaacccgggaggtggaggttgcagtgagccgagatgacaccactgcactcctgcctgggcgacagagcgagacccggtctcaaaaataaaataaaaatatttttaaaaaatggaaatggtctaatgtttgcacgttacctgcaggtattttctagcttgctcatgaggtgtggatgcttgtgacgttccttgtgtgtgttttattcatttttttaagtttttcactttcgagacagggtttctgtatgttgcccaggctggtctcaggctcctggcctcaagtgatcctcccaccttggcctccaaaactgtggggattacaggtgtgagccaactcacctggccagttgttgtatttatttattttttttccccccaaatattttcagtctgccgctggttgggtgtgtggttatggaacccacagatacagggggttgactgcccatatgtgactgtgtaacctacttcttaaaaacctgagaaccgtgtgtattttctttttgttttttcttttttttttttttttttttgtgacagagtctcgctctgtcacccaggctggagtgcagtggcaggatcttaactcactacaacctctgcctcctggtttcaactgggttcaagtgatccttccacctcagcctcacaagtagctgggatttcaggtacccgtcacaatgcacggctaatttttttttttttttttcttttttgagatggagttttgctcttgttgtccaggctgtagtgcaatggtgcggtctcagctcactgcaacctccacttcctgggttcaagtgattctcctgcctcagcctcccaagtagctgggattacaggcgcccgtcaccacaccggacttttttttgtatttttagtagataaggggtttcaccatgttgaccaggctggtctcaaactcctgacctcaggtgatccacccacttcggcctcctaaagtgctgggattacaggcgtgagccaccccatgtgtattttttattcttatttacaaacgtccactggatccctggctgtggaaagcctgggcagggtctggagacccaaggcagtgggaggggagatgccccattgggacccacatggggcaaggaggccaggtgggcctccctggagcccagcaaggacctggagtggggagagggcagggccactcttgaggttcacatatgtgtctggggcagctcttctgggagaagaagctgagcggcctgaacgccttcgacattgctgaggagctggtcaagaccatggacctccccaagggcctgcagggtgagcgggcaccctgaggggaggcggaaggggatgtgccgggtggggtggaggtgctgcaggtgccctcatctcctggcagggtggatggctgttcctgctttgggtgcttagggcaaatctgccagcgactggggcaggaggaggggacccagtggggttggggatgggtaagggcgcttgggctgggcccttcattcttgaccttggagaccctgcgggtggggctttgtggcttccaggtgtggcgcaggcctggggctgttttcacctgcaggacgtgcagttttgccatggagatcctaaataaacaaacaaggacagctgactttgcttctgtactctcccagcacgtccacaccacagaacaaagaatgcagctcttgcatggttttggtggttgttttttgagacagggtcggctgggtacagtggctcacacctataatcccagcacttggcggggctggggcaggagtttcacttgatctcagaagtttaagaccagcttggacaacatagtgagaccccatctctacagaaaatacagagcaaggccaggtgcagtggctcacgcctgtaatcccaacactctgggaggccaaggcgggcggatcatgaggtcaggagatcgagatcatcctggctaacatggtgaaaccctgtctctactaaaaatacaaaaaattagccgggtgtagtggcggccgcctgtagtctcagctacttgggaggctgaggcaggagaatagcgtgaacctggcaggcggagcttacagtgagccgagatcgcaccactgcactctcctgggcaacagagggagactccgtctcaaaaaaaaaaaaaaaagatacagagcaagaccccatctcaaaaacaaaaggcagcctctccgtggcccatgctgaagtacagtggcgccgttactactcacagcagcctctacctcccgggctcaagtggttctctcagcacagcctcctgagtagctgggaccacaggtatgcagcgtgacacctggctaatttttgaattattttgtagagacaggagtctcactgtgttgtccaggctggtctcaaactcctaagctcaatcagtcctcccacctcgccctcccaagatgctgggattacaggcgggagtcgccacgcctggcctaacttgcttttttttctgttatgaatgtagtaacacaagcgggagagggaatttagaaatggaacccaagttggggttccttccaagaaggtggcagctcccattcttggggcatttccgtggcctgtctgggccacagctgccccgtggtgacctctccacttgcggctgtttgtccactgcctggcaggggtgggacctggctgcacggatgagacgctgctgtcggccatcgccagcgccctgcacactagcaccatgcccatcacgggacagctctcggccgccgtggagaagaaccccggcgtatggctcaacaccacgcagcccctgtgcaaagccttcatggtgaccgacgaggacatcaggtagccccttggcctggtcccctgctgctccaccctgtctcttgtggccgtggggaccctgagtgtccccgtgtgcctgcgtgcttcccgtctccccacgatgctgctggggttttgaaacagaaacagccagggcaaggggacccatcgtcggagcagtatgaaccgtttcacccgcgtcctgggttcagggcgagccaggcaccccttggaggaatgttcttgaaaagagtgtggtcctttgagtccgtgaggactggctatgctgggtgctgggctccatgttgggccctggagacggagggacagggcaggccaggagtctctgccttcagggagatggctctgggtgcctgctgaggggcagttctgatgtgcagagcctcggaacgaacagcagggaacacggccgctcagaaacaggcaacagtcaggtgaggctgagcagcccaggggtgagcggccctcctgcggggcctcagggccgaacccacttccagtgtgcagagtggacgcaaggccgcctggtgacggaggcgcctgcaggaaactctggaagtgctggagcgaagacgggacctttcacgttcagtgcagcacacggcttaggtcagaggaaggaaaggaaacttgacggttccagaaagaaggagccaagacccggaacggccagggaggcgctgggcatgcgggtttcctgtggcagcagccggggttaaaggcccctgggcacaagaagagaccctgtgcccccacacagggtgaacagatggacctgagacgccacccccacaagcacacaaactgtgggcgccaagggttccatccggagcggctggcggcatcctcctccggccgtggtacctctgggccccctcttttgggtttgaggtccatttacactctctgcgcgctcagagaacttcccgaaatgaagatggtgaaataggaagaattgtcaacaaaagaaaagaacaagactgtgaaaaatagcagacagatcattaaaagccctgcagaacttgcagaaataaggccgggcacagtggctgacgcctgtaatcccagcactttgggaggccgaggcgggaggatcacctgaggtcaggagttgaagaccagcctggccaacatggtgaaaccccgtctccactaaaaataaaataattagctgggtgttttggcacatgcctgtagtcccaggtactcgggaggctgaggcaggagaatcactggagcctgggaggcggagttgagatcctgccactgcaattcaacctgggtgacagagttaaaaaaataaaataagaacttatagaaatagaaaagggcattgaaatgaggaactcggtggtgggttccgcaggaggtagggtcctgtctggaaagatgacgagcaggtggtggctgcagtcgagtaggtgagccagggtgttccgggtggtggggacagagtgagagggagcagctcaggtctgcaggagccgctggagagagaccccggaggcagggggcggctgagcctcggccacaactggggagaaacaaagtcagctttgcctgggactgaaagcagaacagagacgggctctttgggcagccggagagggaggtgggcagaagcacgtgctgcggccccggaggcggcaggcagaggagcggccaccctggagtgcctggcatcagcttgtaggccccgaggaggaggccccccatccctggtggtgggttgagacgagggtgtggattctttttctcaggccgcccgagccatggtaaaggagtacacgctggtgcatagtgggcagcggaaaggtgacccccggcctgcgagggtgggggctgctgcgggctgatggtagctgattttggtgaggcttgcttttttttttttttttttttttttttttggcagaatctggctctgttgcccatgctggagtgcaatggcgccatcccagcccactgcaacctccgcctcccgggttcaagtgattctcctgcctcagcctcccaagtagctgggactacaggcggccgccaccacgcccagctaatttttatatttttagtagagatggggtttcgtcatgttggtcaggctggtctcgaacgcctgacctcaagtgatctgcccacctcggcctcccaaagtgctgggattacaggcatgagcctctacctggcctggtgagggttttcctgccccactcagtgcctgtcaagggacaggagcaagggtttacacagctgagccccggggaggctcagggccaagtctggggactgaagggtcaggcccctcccttggtcccagtagaggtggcaggggggccatctgggagggtggcggacgctggcgatggccagcggcagccggtcattctctgcgtggattgtgaagggaggggtggcacgggccagggctggtcctgggggggtgcctgtggatccctcgggcctcccctcccagctgaggtccccacgttcatcctgtgtccatgtcctgctggccgctcaccttggtgtaacgcaaggtccatgtgtccccaggaagcaggaagagctggtgcagcaggtgcggaagcggctggaggaggcgctgatggccgacatgctggcgcacgtggaggagctggcccgtgacggggaggcgccgctggacaaggcctgcgctgaggacgacgacgaggaagacgaggaggaggaggaggaggagcccgacccggacccggagatggagcacgtctagggcaggtgctgcggggccacgggggctccctggagtcgggtcctggcagtggggactgcctggtgaacacagatgtgcttgggatgacgggtgcctcccaagagcttcccatctccctagaagagcccaagcgtccccgtcccgtggagtcgctaaagccagccctccctgtcctttccagaggccctgccgagagcccgtgctgcctgctggagccgcctgcagacgcggtcctcggccccacgtgaaccaggctcggcggcgaagcccagccttggagacacccaggaggaaggccgtgctcctggctccctcctcggcccgtccccacttcccggggcctcggggcacacagctggggctgcccccacccgaaagaccctccacgctcgtcctctacagagtccggcttcgggaagtgccgggtgctcctgggccctgcctggctccctacgacctttgggctcgaggccagctcctccccatgcccgctgtcccagctccttgagactggagagcagccagcaggtgcccggcagctcggcgccacggcttgctgacagctgggagggtttctcggtctggaggcgtagttttgaaactcacatcacccactgtgcagcgtgaggacgggactctggtctgctgtggggggcatgcaggacggcgccactctctgccctgccatgcggctggtggtgccacagagcctcaccgtgcctgagtggcatgcccaggaggccgctctccttcagtaaatgtaacacagtcgaggcacgtcatcgggcagccttccctgtgtgccaacgccagccttcgcttctgaaaaccaaactccagccgctgccagtcgggacttggtcgcccggcgctgccagaatgctccactgccagccggcccccctgcctcggtttcccttctgtttagtggcgacacaggcacccagctttggggtggtgctgacgctcccaggggtgccaggagccactgggacagggtgaggctcccagacgctcctcgaggtgcccagctctccagggagcttctggcccaaggccgtctgagggatctgctccttaaccccccagtgccttggcgagggcaggttccaagccacagacgcctgccccgagtggactctgcggccagtccctggtgccctcctggccctgctgcccagtgagggctcctacgggtgggttcattggcctgggcccagcgagcccccacctgcattgaccttaggcccatagagagggcctgtcccggtgctgccccagccaggatctggtcgctgccccagggggactgatgggcagagtcgcccctgtggctggactgtgaccatccctgatggggcctgaccgcgggagctgaggaagcgccgctccaccgtctgccctccaaggacccgcatggaggcagtgggctggcagcttcctgctgctccctgtcagagtcaaagcacaaatcctcaggacgggctcaagggccagggcagccgagggaagctccaggtggggaccacgtcttcctgaggttggtgcccactggctgggaccctttgcagtggggtggcctcccctctgtctgcctggtggagggagccgtgggcgtggggacgtgactgaataaagccaccatgggtggatgtgcttggagcctggagttcggtgcgtccgctagactttggtgcccacgtttgagcttctgtctttggttgggtgatgaaaggctgaaagcggtgtggggacagggccagcaggtcccccaacctcgcggacattcacaacccaagagtcaggcttaggggtattcagagaagaccaggccggcctgggcatctgtgggcaagggccgtgccccctgaggtgccgctggctcagcctagggatcgtgggtcttggccctgctgccccggtgaggaagatgggctggggctcagacccagcaccgctccttccaaaggaagggaagcaggaggggctgcctggcagggagggccccccaggtcctcaggtcctgcacagccgctgcagggaggggagctgtgccccgggaccctggacttcagctcactagccatggccactggaagctgctttctggacctgaaggctgggaggccaccctcccctcatctgcccggcactcagagacactctgtttccctcttcccatctcccactgtgtccctgtctcccttggtctctctctgtctctgtctatccctgtctctatctctccctcttgtctctctcttgcgccgtctccctctctgtccctctttgtttcttgctctctctcctgtctctctccctcggtctctgtctctgtctcttgctgtctctccctctctgtcgcagcccagcttcctgtcactgacagaccccgatcagtccctctgatcccggggttctggccatgtcctggccttggtctgagatgtgatgatccctacccctgccacagggccctccccactggaagcccatccaggccctgggctgtcgctgttgacgaagcttgagggtcctttcctctctccctgaaaccttggggacccccacaggccaaggcaatactggcctttgctagaggtcgtgcccggtgagaagtgagttgtaggcgtgggcacctgaggggccagcccagtgctcaggccctcgtcaaattccctgccctggaaaagtctcagaccctcaggctgaaccccctgggcgcaccgaggctccacactccagccccagaacccagacctggcatggggcggggaagcctgagctcccaatgctgggatctttcgtgggggcctcatgaccagcctgccctgtgcggtgcctggccccatcctcaaaggccacttggctgcccccagccccgcccatgtctcagccccaagaccttctgggactttttttttttttagacaagagtttcgctcttctttcgctcttgttgcacaggctggagtgcagtggcgtgatctgggctcactgcaacctccaccttctgggttcaagcctcagcctcccgagtagccaccacgcccagctaatttttgtatttttaatagagacagggtttcaccatgttggccagtctggtctggaactcctaacctcaggtgatccgcccgccccagcttcccaaattgccgggattacaggtgtgaaccaccatggcagcccttctggcacttgccagcagcagcaagagcctcacgtgtcccccgcctcccctcagaccaagctccccaccgctgccgccacagagggtaccagggaggagaggctcaggacccccgtggcgaggatgcacctcccagccctcggcccagccacacggaccacagggctcccgagtctcagcaacaccagctaaggggcatcatgcctctcctgccacacccagggcccgtgccttgctgtccctgcagcccccagacccaggcagacagggacagcccttctgaccaccgcacacactcgccaccgcaaagatccccggggatgcccctcgcctgtgtgtgtccctcatggctgtcacagcaaatctccaggagcccggaggtgcccatggaaaacacccccagcttccggaacgttctttcggacagggccataccggagcaagactcagctttctggtagcgggtggctgggcactgcctgtgagattctgtcacactcgctccagattcaaggggtccaaaaagtgtaaacaagtcaagtgcccatccagggatgaacgaacacagcccggcccggccacaccatggagcaggactcggccatgaacaggaaccaggctctgacaccggccacggcgcagatgcccctggaggagtccaccctcagcaagagacacacagacaccgacacggcgtgcaatcccatttgtgtgaatgtccaggacaggccgattcagagacaggaaggggacacgtgggtgccagtgactggggattatggggactgggggaaatggctaaagggcacccacaaaagttaatgataatgttccacagttttttttttgagatggagtctcactcttgtcacccaggctggagtgcaatggtgtgatctctgctcactgcaagctctgcctcctgggttcacgccattctccctcctcagcctcccaagtagctgagattacaggcatatgccaccacccccagtagagacggggtttcaccatgttagccaggctggtcacgaactcctgacctcaagtgatcccccacctcggcctcccaaagtgctgggattacaggcatgagccaccgtgcctcaccagaattgtgtacttttttttcttcttcttcttcggcatggagtttcgctcttgttgcccaggctggagtgcaatggtgcaaacttggctcaccgcaacctcctcctcccgggttcaatagattctccagcctcagcctgctgagtagctgagattacgggcgcccgccaccacacccagctaatctttgtacttttagtagagacagggtttcaccatgttggccacgggcaaaagaattttgttgagggcaaataatatgagaccacaaaactgccttccctgctcagttttaattttcacagttttaatttttagccttctctggttaccaaaataaccacgctcacggccgttcatttgaagatatttccagttaacgtgtgtgaagtgggttttttgagatgtaatttacaagcaataaaatgctcctgtctctgctgtcctgcctgccttccttctccatcacaggattctccctgtgcattttccttttcctttctgagttttgttttgttttgttttgttttttgagatggggtttccctcttgtcgccaggctggaatgcaatggtgcgatcttggctcactgcaatctctgcctccccagttcaggcaattctgtctcagcctcccaagtagctgggattacaggcatgtgccaccacgcccggctaattttttgtatttttagtagagacggggttttgccatgttggccaggctagtctcgaactcctgacctcaggtgatccactgatctgcccccaccttggcccctcaaagtgctgggattacaagcgtgagccactgcacctggccttttttttttttttctttgttttgaagcaggatttcactctgtcacctaggctggagtgcagtggcgtaatctcagctcactgcaacctctgcctcccgggctcaagcaatcctcccactttagactcccaagtagctgggaccataggtgtgtgccatcagacccggctaatttttaaattttttgtacaggctgggcaaggtgggacacgcctgtaa

SEQ ID NO: 856 - DNA, 39066 bp, Homo sapiens
  source 1..39066: mol_type = genomic DNA
tatttatttaagaagaaggaaaaaaaaccctagccaaacagcctatgaatacatatgctcacatcccctactcctccaactcctaatttccccgtctccagagggcacagttgtaaaccttgacgaaaatccaatcttctgtgcgggaatttccccccaccgcttgccgcccccgcgacagtgagtgggagctggaggagctctggtcccgctgcccgggagcacgcggagccgggcgaccgcggtgcggcagccagggaggaggggaggcggcgggactgggcgcgggtcggcgccgccgcgacccgggagcggggtttgctcaggaaaaggcgccgtcgcggcccccggccacccctccctggccccgggctccctgcccgcgcgcctcccgggcctcgcggcgcgctaggcgcaccgcggcggcgcgagcgccgaatgggagcggcgacccggccagcccggcagccccgcgggcggcagccagggcgaccgcggaggcggcgggcagggcgcgtgcgcactgcaggggcgccagatttggcgggagggggagtgtccaaagctctttgtttgatggcatctctgtttacagagtttacactttaatatcaacctgtttcctcctcctccttctcctcctcctccgtgacctcctcctcctctttctcctgagaaacttcgccccagcggtgcggagcgccgctgcgcagccggggagggacgcaggcaggcggcgggcagcgggaggcggcagcccggtgcggtccccgcggctctcggcggagccccgcgcccgccgcgccatggcccgaagaccccggcacaggtaacggggagccgggcgggcggccgagggcgggggcgcgcgggggcgcgcggggcgccaggctcccgggagcaggtgggaattcgttccgggatcatctgaggggctgtcagaccctccgaggacctggagcccctgcctcggcagcagaagccgctccagagactgatgaatggaagagtctttgcgggaaatgtatccggacgttgggaagcacgccctgcggctcattttgcaagttgcatggggatacatttttctttagggggaaaaagaaagcacgttccagccgagggcagagcggtgcccaccagccccggggagcccaccaggtgcctggcttgatgccgcgggtgtcggcgagggatccgcagcgtaattgctggatgcattgagatatgtttggacttggaagtgcagagcatatggcagatacagggaaaatgctggattgtttagtagctgcaggtagttcatttaaatttcattcattctttatggaggcgaggaccagtgtcagctgacaggcggctgaaaagcagattttagggggataaaggggtctctacttttgcaaattgtcttaagacctggttttggaggttcgaatcatttttctctgaaaggcttttacttccactgcaaacattgcacgcgcacccacacgcgccgccgtcgcacatgtcactgcacttagggaggctcgccgggaagatgggtgcagtcccttcacatttttggccggacagatgggaagagggagaggaggaggaggagggaaatcctcgtccgaactgtcagttgctcgttccccagtctccaccggcctctggactttcccagcagcacacgccggggctccctgcgagcggcgggtgccagggctagctcggcagccgtcgcagtcgccactcggctcaaggggacagaggccggcagcacccaaggccgctgccgcgcaaccgggacgcgatccccgcgggctctgcccccaggcgaaaggtccctgcgcggcgcgcacacgtggatgcggctgaggtcgccgcgccttctcgcaccctccttcagccgccttaggtcgccccggccgaggcgcggtgaccggacagaccctcgcgaaggagttctaaggcgaagtccatggaggcaaagcaaatccattcgcctttccttagattgtttgattttctcctactggtttgttgttgagcctgcgggcgctggtccccgcgcggcgctgggaagttgcaaagagcgtgggtggagaccctgcagcagcacccgcgggctgggctgggcggggagcagcgccggggcttggttgggctctggggacgagagggcgacttgggggagctccgggctccctatgcctactccggagcctggccgcgcaggacggtgtgctgcccctcgagggctccacttttcgcctttaggacttcacaggacagctaccggggtcatctgttttttttttttttttttttttcgagagctgaaactggcagcaggaggagggagtcgggcaggggtgctgggaggaggcgcggcagcggctccgcgccccgaggtctcggccgcccccgcggggcggggccgcgcaggttccctgaggctccaggtagcccagaggggaggcggctgggaggggcgggagccttgaacctgcctcaggggaagagaaacccgactgcgggctcggagccgtttcttgcaagggcgagcgtcaactcggcagggattatattaaccaggtcagcgaaatgagtttgaacccctccgaatcacagtagcggccacaaggcacttcctcccgctcccctccctcttcctaacccccagcacctcttttctttttcgtttctttgcacggtttgtttccttgacagaatgtaacattcatagttgtactcttgtaaccacaccgggtctagcaggtggggagtcgagtgcatcaaccctgaaatcagcctttgaaaatcctctgactgttgggtctgagatcttgtcagagcagataaaggaaaagttatttcaggttccttagtagaaattaatcatgcttctaggacgacttagagcaagcaaatcgcatgcaaagttcaaaggcgagcctgggtggccagcctggcagggaaactcaggagctgggcgcgtgagcagccccggactcgccctgctgcgtcctggccccttcaggtcctgcagaagtcactctccaccttgcccccaagaccttagttttgcacatctttgcctctgtgcttagcttttaagaggcacggaaggacatggcatggtcatgtattagcgctggaaagtaccttagaaataggatccaagcaagcccttattgtaaaggcgaggaactgaagtcttgagagagaggaagtgatttgtccaagtcatacagctaggtggaggctagactagaacctttgcctccagaaccctagtcctgttgattcccgtgctctcacctgacgttggctgccccctgcgggcggctgaataggttgcttgttcctgggttgttaaaccgctgcggagagagaggtgctcaatgactactctgaaaaatgtgctcagttctgaaaatgtgacctctagatccagccaaacctgaaaagttaattcgacttgaatctatgactgcagtttcagattcctctggttttcttggtgtctctcacatttcacaagggactgcatttggggtctttccaaggagttccctatgaatctttcaaaagatgcagacttacacctctgggctttatagctttttttttttttttttttttttgctttatcatatcgtgttttacatttttgtagttcttgttcagaagttgtttagtgcctcctgttgacagtggaaacagaactaggctattgtttcaaaacacagacactaaatgaaaggaattattacagattataaatatatatttcctgggattttatttggtggtggtggtattttaaatttggattacatcatgtcgccattcaacctggactatcagattgttgcttaaaataatagctttaaattatgagaacccccaattcaggatttttggtaagcacttcagcttcacttgtagggggctggtaatatgcataccagtgagttagtttgggaagacaaaacctgtaatgaatataacttttctttttaaaaacaatgatttacattatgatatggctttatatcattgtttttattggtcttagtttaatgggtttcccaacattgcaatgacaaattttagtgaagtttctaagatagtatttttcctattttaagttttataagaaaaactataaaataaaccgtgtctgtaaaattattgtcatctgatcagttgattagattaacaaacattatgattatgattaacaaacagtaagcatatagttacttcttcaaaagtcataaaatttcctaggttaggttaactaaataaaagaaaaagctttcgaaaatagtaatgggttcttttaaatccatggcttttttctggggaaatcccttctggattaggttacattttataatatttcaaacaccattccatcagagacagaaaaaacaagagtaagtaagactctgactaacaagtggcctaattattcacttagttactctagaaactaagtattgtaaacatgggcacaagttggatcaaccaggcctggagttgtgagcaatttggtattaattttatttacaaaacattaaagcttgatcactcaatgttcttatctttgctttggttttaaaatcctttcctcttagattctcctaatcctctagactttatgggatcactataattctgttttgcgctgtactacttcttgatttttttcttcttttaataaaacaaaaaccccattggaatagcatagttgaattgtttattatgtttgagaaatattatttaaacgatgtgacagatgccaaagattttgagtgtgcacttatataaaggacatgggttcttgttccttttcttatccttaaccttaagttttcaacttaaaccttcactggttggaaggtggccaaatgtgtaacttgtccctggtctaatagtaacagcaggttcagacatgcaggggaataggaaggtgccaggtccttggccgtgtctgtggatacccataacagcagaaccagtttacaatactagagcaacagaatgcagcaaacaatcttgttgtgcaagttttcaaagttttgtcttcataacctttgaaaagattgttgaggagttttgtgtaagttttgtaatccagtagtagtctaaatcctcttgtttcagcccacgtctacccattcttatttctgcagcatatatagcagtgacgaggatgatgaggactttgagatgtgtgaccatgactatgatgggctgcttcccaagtctggaaagcgtcacttggggaaaacaaggtggacccgggaagaggtaactaatcattttatcaagacgcagaaaatagatagagtgtataatttataaaaaacaaaatttcaactaaactacaggtgctcaagctcattagcaggctccttgagatcttatcctagcccgcatgtgcagcgtgccctatgccccccacttcattatattatccatttccacactatttgcagttctttgaatgtcctcttctcattttaggcttcatctgtgtttccttttgcctgttgagttctcatccttttgtcccacctcttcttcctacttttacattacccatgaaggcatcacctcttctgtgaagccatccctggcttcgccggacaggattggatgcatcctcctgtgatcccatgcatgggtgcatgttctactttattgttgctgggacatatatacctcctccagctgactgcaagtctgttgagggcagggctcttgtctattcatctttgtgtttcctgaattcacaaatgcttggacccaaaataggatattaataaatgttctctcaataagtgaatgacttgctactcccaaaaacaaaacaaacaaaagaataaaacaaaacactcagagaactcatctttttacagtgtattgatttaatatccttgatatacttaacagagccatctatatgaaggtatgttttaaaatcatccgataatggatggagacacatctgcttctcctgtttctttttcggctggcttatcaaaagtttgattttgtaggaatggaaaaatattttagaagcaaaattattaatatgtggagaaaagtttctctaatgttcttaaaatttttgcaactaattttagatgattcatgttacaataaatggtattggctcttcttcagtttcactgttctctgcttcatttaaaccagagctccttttaacaggcaggtaggattcccagagaggcccataggaaattcatattttacctattaagattatccacttggataatccttatgatacggaaattctgttgtcaacattggtttcctaattcttgtgtctgtattgtaccagggacctccactgtgtgtgaatgttacctttgcagaaacataagaaggaatgcatttatatacttatgaactggtaggattgtgaacagcatataaactaaaagaactgattagctggaaatgtttaatgtcttttatgttctaacacatctggcctatctaaatctaactgattttcttatatagctttcaaatttaattttaaaaatggtctttatttctttataaaaagttaaactaactggaaatattctatttcttgctcaagatcctatttattaccataggtaaatgtgtactgaatctagcactggaatgcattttttcctaacagagtaaagcagttatttataataaacactcaatatatgccaggcattatgataaatgttttgcaaaattgcctcatgtaatccccaaataaccctgttaatatcagcctcatgttaataaattgccccatgtaatccccaaataaccctgttaatttccattttatagatggcaatactaaggcccagaaaggtaaaatggtatacccgctttacacaattaatagttgagtcaagatgccaactctggtctgattctaaataaatctatactcccaagtccgtatattacattaatatctcctgtattcggatactttagagagactttttattctagattcgttccctcattcactttaacttgaacagagttatatagtaaataactgatatcctaggattacctttaaatgtcttaggatgaaaaactgaagaagctggtggaacagaatggaacagatgactggaaagttattgccaattatctcccggtaagttagtaagtttttcttataacgaaaggaaagcttctcccaaagatttctataaaatattctaggaggagttattaagatagtgtataatttactcacatttaagaagtgggagaaatgccctacccataacttatattttatattataatgcatataattaaattattagaatttagattattagaatcgattattataatttagattatcaaattttaaaaacagttgcttcttgttttatcttttcatttataggataattagtattttgatgatttgttacatggtagttgattaaacttgatatttcctccaagtcagtttttcctgaattccctatttttgtcaatagcaatacttttggcaccaaggtttaaaattctgaagacctttcttgacttatcacattcccccaacccctacatctaagcagttactaaggaccctggaattcctttatagtcagtcccgtccttttcattctcatggctgtgctgaaggttgggctcctgccctctcatttggactatcatataacttcctaactggcttccccacttgtagttttccatttttctttcttttttttttttttgttttttgttttttgttttttgagatggaatctagctttgttgcccaggctggagtgcagtggcacgatctcagctcactgcaacctccgcctcccaggttcaagcgattctcgtgcctcagcccccttagtagatgggatcacaggtgcccgccaccatgcctggctaatttttgtatttttagtagagacaaggtttcaccatattgatcaggctggtcccaaactcctgacctcaagtgatctgcccacctcagcctcccgaagtgctaggattgcaggcatgagccaccgtgcccagccagtcttctacttttccattcatcccaaacaccattggcaggtggaacttcctaaaatgcagctgtaccttatcttttcaaaaccaaccacagtgacagaatctcacaaattaagtaaactgccttgacttggcacacagaggccctcctctattgccccaacttacagctccagttctgtttcctgcttcctctctctaagcaggtttgcttgaatttatttctgctttacctcctctgggcttttgctcctggtcttcccacctcctagaatattctccctttatgtcaccaattaaagttctgtccatccttcaaagtccttatgaagagctcttcaagactcctcccaaggaaaccatttctcctcctaagaagatgcttctctcctcacttcagtatcattttgctttggtcttttcttccaagtgaatcaaattcagcatctgtgatagtcagtcatctacttgtcttttccttcttataagtttacaaactcctgtaacataggacctatcttttatgcatcttttttctttctgcaatataaatactttggtcctggattgaagcacatctcttgtctgaatgggaagcaaactttagtcttttagggtggtttccatgaaagcctgacaacatagaatctctatcaagcctcaggctatgtagatactctgcaaaagtatctgaggttaaggttaacttggcaggcacatgtgtagtatgatggtcctttagatcatgtggcaggaatgtttccctcaggaggcagagtgtctaattttagatgcaactttgatatattacttgcatgttctgtagcctgtaagtaatgagggatagatgggctctaaacatgctctaaaatgttcttaaatattttcactgcatatggtctatgtgtgattcctattacaacaaaaaattcacgtgcttatcacatcatatctttatggtggtgcatactttatttgtctagaatcgaacagatgtgcagtgccagcaccgatggcagaaagtactaaaccctgagctcatcaagggtccttggaccaaagaagaagatcagagagtaagttctttcttcattggtgtgtgactcataattaagaatattcccaaaatgctaatattttcctatttgaggaagcaggtaaaatgggcaaacaggaagtagaggactctattcccatatttccagtgaatgaaagcaaattttggaaattttctaaagatcttgtaacactgaagaatgattatactgactcattacataactttaaaacataggttatttttgtgtgtttatctgaaggtgatagagcttgtacagaaatacggtccgaaacgttggtctgttattgccaagcacttaaaggggagaattggaaaacaatgtagggagaggtggcataaccacttgaatccagaagttaagaaaacctcctggacagaagaggaagacagaattatttaccaggcacacaagagactggggaacagatgggcagaaatcgcaaagctactgcctggacggtaataatatgtcaaaaaatatattgatcgggaagaatgagggagtgggtattgaacattctgctttaaatgtatggtgagtaaattatatttcatcagtcgtaagtgttttattagataaaccagctacatagcttttagagattgaagacatcttagagtttatttggttgagaacttccaggatccacctgacagtgagccctgggtgaagacatttagctttccccagcctcaatttccccatttccaaaatgaatcatacagggccagtgttaggatcaagtaaaatgaatgtcaaaggacttggtaaactataaaactctaaatgcatagaaagaaactgaagacagtttgtctctggcagttcacgtagctggttaagttactcaaaggaactcagctaccattttcctgataaccatcattcatttcttttattttttttaattattattttttagagacagaggcttgttctgtcacacatgagtgacagagtgcagtggcatgatcatagctcaatacatccttgaactcctgggctcaagggatcctcccacctcagcttcttgagtagctaggactacaggtgcaccccactacacccagctgattttaaaatattttttgtagagatggaatcctgctatgttacccaggctggtatcaaactcctggcctcaaacaatcctttcacctcccaaagtgctgggattataggcatgggccaccatacctggccaccagtattcatttcattataccactttgcttaattttttacttcattgattaaagaaataatgtatttcttgaattctcatactacttccaggtttttaaataatgtcagggtaataatgctttctttttaatgaacaaggcaagaaaatgacctcattatgagggataactatggaagctcattttgtcccatttttcccacttaagtagtatataacagattttgttcctttggaaagcaatacttttaatgataaatcttgcattaaaatgatgtagatcaaaaatattaaaaatagttttattcttgagcttcataatccaggagaaagtttatatagtattctctagtgatgctccaaagcatttgcacccttgtggttcagtataaacttagaaattttaagaggttggtaaaaaaaggcctttcctcccatatggcctgagaggatacactgctgattcttctcaaaattaacagggctattgaacttcctctttctttagcatacattcccccacccccattgaaatagaaaaagggagacttaaacggtttttttgaattgagaaactgttttcctgagaatggaaagactttagtaaaaatgcgttgccttttgaaaatatactgggggttaggatctttccctttgggatcccattttccactctcgtctctgtctgattcagaaaacaattggggtggctttcaaagagtaggaggttttttggtctcagaagttctcactagtgctttgagagataaagagtgaagtattcttcatcagcagcatcttatcatccaccagacttcaccatgtccctctcgtggtgtgtaggccctgctgtgccacattcaaaggagtaatttccccaaggcagctggaactttacattgtgttggagtcttgtaccgcgaccggtcagaataaacatgaagcgttatcgtattgaaaatactcctttaccaaggaaatggaatggttaaaagatactgatatttctagaaaacgacatgcattccagattgtgtaactaagagaaatctaactaggcaatagagaaagcctgatctcagagggtggagaagaaggaaacaattaaaaagagaaaacaactaataggcccaagggaaaggtctctgttagaaacagttttctgtcaattcactttaatctgaattgaaatttttgtttgtgaaatttgtgtgatatatttctgtgcagaactgataatgctatcaagaaccactggaattctacaatgcgtcggaaggtcgaacaggaaggttatctgcaggagtcttcaaaagccagccagccagcagtggccacaagcttccagaagaacagtcatttgatgggttttgctcaggctccgcctacagctcaactccctgccactggccagcccactgttaacaacgactattcctattaccacatttctgaagcacaaaatgtaagccattcctgtgaatctagtttaatgagagagacggttagtttagctccaggtaataatcatactttgcagttgtatacttttcagagaactttcctgagcatgatcatggccagtcttcacctatgccctttgaagtagatagggtgtaggtatggtgtgttacccctggtttatgtctccagaaacgaggatggtaagcgctttgcccagggtgacacagctcatagagatagtgctgactagaaaacgagctgtccgattctaaattgctgcttcaaatctaatttgaaggcaacctttgaatgtaaatttacttaaggtactattgaagaataggggaatggagtcgcatttgtagatgtaatgtttttctcttccaaaacgaaaagggaaggtagtattatgtttaaagaggagagagtttgacactgaaattcagtggttatggtatgtttcattctggcagtgatcaggcagacatgtcttaatttattcactcagtaagtgtttaccttcttactctgagtcaggagcagaactttgtgacattcattttctgatgtctccttttagtctccgttggatcagtgtgatcccttccttatttctagatatttatatttagggaaagtgataatccataataggtggaaaaagaagaagaaagaggaaaaaaatcgagaaactttaatcttaagaataacaatattaaatgataaaacttacccaagaatagagagctcatatgcaaattatatgcaaaacatgttcataaatagtttttattcttctctgtccatggatttgactacaaactttacagaaaggtctcagatgaataaattatcataagaattcctgtgctttttattaaaactcaaaattattccaagaaaaatatttttatttacaaacagctggtgccatcaatttttcccatagaaacaattttgaaacattcattaatgtattttataatatattttttattgtttttttcattgtgtttttctctaattaaggaacacttcccaaaatttaaagtgctcatcaacacctcccaaggatttttcaccatgttcctttagctgtttagccattttaaaggcctggctaaatttcacattaaaaggttttaaaaatttgtttagtgtattttatcagtaaagtgttttttttctctcagtcccagaacgaaacctcaggaagccaagtcccctgaagcatatgtagccctgaatgacgtggcctttgttttgtcttttgcatctaggtctccagtcatgttccataccctgtagcgttacatgtaaatatagtcaatgtccctcagccagctgccgcagccattcaggtaagatcattgatcattcactgttcaaagcaccacttttaagaaatgcttatttctttcatctaaacacatatttttacctgagcaactaaagtaaaaaggaaagggaacatggagaggagagcagagtcttggccagcaatctattaatcttgtcttctagaatgagtttgctctggaattttctgattctttgatgttgcaaggtgaaataactcatcagtcagcatccactctagcctgagatttcacatcactcccttaagtctgaaataacattcacaaagatttctgcaggagccaaatttggttggtggtgttgtcacagtgaggctctttgggctgtgcggcacctcatgaccatattggctacacccattgtatttgcagcttccaatcagacctttgtctttatttcccttactttgtaatttcagagacactataatgatgaagaccctgagaaggaaaagcgaataaaggaattagaattgctcctaatgtcaaccgagaatgagctaaaaggacagcaggtgctaccagtaagactgtcatcatgtgcttgaatgaggggatagcagctttgcctcagtttacctaagcgctcttctcttctaaatattacacttagcaaggctccatatatccattcagaatgtctcaacacaagaagttgcttgtagtaaaatgtagttggtatcagattatatgctgattaaattggaagcagtctttttgtaattgcaataaaaatgcaatatccacttatgattgttatcatcaatttttttcttcagaaggactataatcagtttaaagactagcaaagataaaatgaatgaaaatctgcattttctacagagctatgtatctatatggtaccattttggtttttttctattattttgttaacctatattttcatattttataatttcagacatgatttgatgcatgttcagtatatacatgtaaaaggttatatataaaacctcttcataaataacattagctgctctcttttatttgcatgtgtgaaagttatgtgggccattactgaattctgacatctttagcgactgggcagccaactgggatggctccttgtgctttgcaacatacatagttaaccaacaaagacaataaaagagaagtgatgcccagtaggtattcctaggggtaaatttattttttgttaaataataagatgtttatgtgcacatgctagttcgaccactttttaactttagttaatgttttgcaatttctcctgttgtgtggtcatactgtaaggagacttctgttaatttgctcttctgctttcctaaccacgttgatttggcagtgcttcactgcatcagtgcaatctgtagcattagaaagggatagaagcaacaagaatatgtgtagatcaaagcaactctaactcctgagtcctctagcttttttgtggttagaatgcaaataggacagttcttcagttcttcactcacagcaagcatttatggacctttggcaaattatattaaagtggaattttaagacaatatgataattatacttcgaaatatagacctatgatttgacatttttacaaaatgataacaaggtaatcatataggtacaacctctagcactattaaaaacagggtcttgcattgataaaaggaaacatcttgacaactgtttcataggcgtaagtttgggatgatgcaactactcttatctttcctccaacagcatctgataccttgtgcaacttcattgctaagttccttctccctttcttctgtcctctctttatttctacacccttcccccttccttagacacagaaccacacatgcagctaccccgggtggcacagcaccaccattgccgaccacaccagacctcatggagacagtgcacctgtttcctgtttgggagaacaccactccactccatctctgccagcggatcctggctccctacctgaagaaagcgcctcgccagcaaggtgcatgatcgtccaccagggcaccattctggataatgttaagaacctcttagaatttgcagaaacactccaatttatagattctgtaagtagaattgtgaagggaagttaacgattctggaagataaattagaaaacccatttcttaaatcattgccattttctatagccaagctgttattagcatatattaatgtaaaggtagaagtatgattttcatcttcatgaatatgttttttcaaagatctgatttcatagcctaccgagagagacaaaagtatttataaatacttacaaaataggacttttgaaggaagagttttttttcacattttcacacttttccttcaaaagtcatatttttaaaaatagtcagattgatgacttataaagcagagcttggattatgggaacggaatggtgtttgagttacttttaacttttttttttctttgcttacttcatggtgcttctctagaattttgtcttgcttttgaacagcacattaatgatttggcttactcagagctgaaagcaatcttttagtgtatttgaagtaataatcagctccttggtcatacctggctctttccacaaaatggtgattattgattactggtcccattgcttcactgagatgaatcatctttcgtgaaacaaatttgtattcagcacctcctcagcgaacacttggttcctttcccagttgattaaaaatcatttattgcacactcattggttaggagatgaccattgccgtaatatgccatctagaaaaggtcttcattttgctttccattgcatgcagatgtagagtgtcgggaggtccctgcagcacatcagagggccagccttgaggcagcccactagaccctgctctactgcagtataatagagcaactgctcatcttgaagctgttgctcaagaagccaaaccaacgggcctagtgtttgctttgcgttgagcatctctctctcagtgctgtttcaggtgatgatggcacacactatctcaaagttctgtgcctcccacattgtttcaggattcttcatcatggtgtgatctcagcagttttgaattctttgaagaagcagatttttcacctagccaacatcacacaggcaaagccctacagcttcagcaaagagagggcaatgggactaaacctgcaggagaacctagcccaagggtgaacaaacgtatgttgagtgagagttcacttgacccacccaaggtcttacctcctgcaaggcacagcacaattccactggtcatccttcgaaaaaaacggggccaggccagccccttagccactggagactgtagctccttcatatttgctgacgtcagcagttcaactcccaagcgttcccctgtcaaaagcctacccttctctccctcgcaggtagaacacaatttctgcacagctgttactcattttcaacagacacctgagccttaataatctagaaactaatacttcggaacaaatgactaattactgctgcctttgctgatttcattctgtcgttgaatctagctgttgctaagttatactgcctcccaaagtttaggctgtctgcaggctaactgttgattttggcatcattctctctcttttacttttgggtggttttgaaagatagttgcatgaaacgtacttttatttccttcaacactagagtttaacatttctgtccctttctttttctcccatctgatccctccctttaaaattgttaacatcatttcttcctcgttgttcatttattcttatgcgattcactgacccaggggaggagggaaccaaattgtgtttatataacatttgggttgcaactagaaaatttaaagctagaaaatttaaaggttccaattcatctttaaatggaagagtttgggaagaggatgagaaacaaatgcttaaggaaaagaacatatttttaatttcagtttctcaacattggctcttttgagttgtgccatactattttactagtgcagtttttgccaaggaatatttttatttcatacagcttttttaaggcatgaaaatcacaattcttatcagagatttgtgttcctaaattatttaaataattaaattaatagataatttggcactttaaaacatttttccaattgtatctgttgaatttgttttaagaacagatttaggtatgatataggtatatacatttgggaaacactgaatcaaacaaagttacaagtaggtttcttagctgggcatagtggcatgggcctgtagtcctagctactggggaagctaaggcaagaggattgcttaagcacaggagttcaagttcagcctggtgaacatagcgagatcccatttctttaaaaactttcttttttttaactgcaggccttctcagagttattaatatgccgttgtgccttgtgaatttccaggaggagattatgatatgttgtgtttcccaaatttattttaccttggaattgtttaaggaacacctagttttttcccagaactttagtgttctgagagacacagtttattattcaagaattttccatataatgtaaaccttctgtaatactaattttggttcatagattattaaagagaaaaaacaaagtatgaaaggaaactattaattattaactattattttccccaaaatcactaaagccttttaaatgttaataaagaacacatctcattctctttaatgacaagtgtcatttattgagagtattttctcacagttttgcaagtttttcagcaatgaccctaaattttatttcttggaaaccacacccaaatcctgggtgctcaattgaaataaaacaataccctagtcaatataacatgcttgttagcatctttattatttaatatagtgggtcaggaaaacattcttgttatctaggtgtgatttttaaattggggagaataaagaattaccatctaatctaagtattttttctttctctccatatttagttcttaaacacttccagtaaccatgaaaactcagacttggaaatgccttctttaacttccacccccctcattggtcacaaattgactgttacaacaccatttcatagagaccagactgtgaaaactcaaaaggaaaatactgtgtaagtctttggttcaggaataaaatgatttatcttatttacttatatttaattaatggaatatagttcccagatgtctgatccacttgtatgtgcataattttactgaccatttatatataatcatgtctattcccacattgaatatatctgtcctgggcatattacaactacctacaggtagaagatgggaagataaactagattccttttgtaacttactccaaaatttcctatatatgcacaagtagttttcataaaacttttccattcggtttgtttgttccctccataaggccttcttatgaaagccagattttcaacctcctttcctctctaattgtaagcttcagaataagaacgagtatggtttcttacctagtttgtatttttatttaattttatttgtttattatttatttatttttagtttgtattttttaatcttattttttctttttgaatttatgtgtagataggacctcttctgacatccccaggaatattatatgattagaagccaagggatgagtaagcagtcatttttattcaataaagccttaatcaattcagagaaatggtagagaaagtgtgaattatcagaaaccttgaaaagaaatgcactgttatttcgaagtacaaaaagtaaattttaaaagtttaacatgttttgtagtatgggctctgttttcatgaatagggaaacctgatttgtaaatgacatcaggtcttcttgatgctcatagtcttatacagatcataggcactacatgtgtcttcagagccattaaggaaagatgttaaatcatttaatgcttttagtcttcgaggtataatattttgaaatatttgaaaatatgtgatatgcatattctctttttcttaacgaataacgtgattaatcagcacaccccaattccatatccggaacagagtttattgtattcagtggaaaaatgttaaatgtaacaggtaaagccatgtagggacatttattcttttgtattgagccactgcttgttttctttttaaagttttagaaccccagctatcaaaaggtcaatcttagaaagctctccaagaactcctacaccattcaaacatgcacttgcagctcaagaaattaaatacggtcccctgaagatgctagtaagttctagaaaagtttttggatttcattggtttattagtcccattaggagttctctctgatgcaaaaatacccactcttccgtttagcctcagacaccctctcatctagtagaagatctgcaggatgtgatcaaacaggaatctgatgaatctggaattgttgctgagtttcaagaaaatggaccacccttactgaagaaaatcaaacaagaggtaaacacgcaaccctttggaagcaacaagctgagaatcctgccccctttattccttgtgtgcagcttgatgtgtctgccattggcactgtgcaacaccacgacttttcgtgcaagattttcatacaaggtgcagcgaaaaggtactgccagactgtaggcatcatcaacctttcctttgggaagccaagccatctctatctacttcatgtttggacagaaaacatactagagagtatcaagaaaagggagggaaagaggtttttaatgtacttttaaacattactgattatataaagttgatatttcatttttagatgtgaagaattggaatttaaattaaaataatagtatctttaattaattgtattaaaaaaagggaggctgggcgcggtggctcatacctgtaatcccagcactttgggaggctgaggtgggcagatcacaaggtcaggagttcgagatcatcctggctaacatggtgaaaccccgtatccactaaaaatacaaaaaaattagctgggtttggtggcgggcgcctgtagtcccagctactcaggagtctgaagcaggattatggtgtgaacccgggaggcagatcttgcagtgagccaagatcgtaccactgcactccagcctgggagacagcaagactccgtctcaaaaaaaataaaaattaaaattaaaaaagagaatctaacctgcaaggatcaaagttttagcttgttggcaacagctgttttccaccaggttagatacagtgcttcttgaatttattttcatgtaaagataagtatttttttttatagctaaaaatctgatttgattatttagtaatggagaattttaccagaatgtgattaaaaaccagtcttttgtcaccaaaagatcttttatgtcaccaaaataaaatccttgacggatacaacactactaggtgtatcattaaaatatattcttaatagaataaacacctagaatcagaacattggttgaaaacgtaggagctttacaggggcagtaaatttggagctagtcacatttcaaatttgccatcagtgtttctttgttgaatccagaagatagagcaaattgagctgatagtgtaagttagcaacatagttttataaaagtatttgagggactggccagaaatatactcctgactgtacatgtttcataggaagttctagaaacaacaaagcactttctatatgcttttaggtggaatctccaactgataaatcaggaaacttcttctgctcacaccactgggaaggggacagtctgaatacccaactgttcacgcagacctcgcctgtggcagatgcaccggtaagtacgtgtgcaccagcccccaagttgttatgtgacactggtgcctcatgaaatcctgtgtgtggcatagggctgctgcggtttcagcactccctctttaacacatcttatttctaaatgttctcctgcacatgatttttaaaaaatgattattaatgtagagtataaagttgagattttttcatgtattagaaacattgcagactttttcattatttgttttctcattatttgagtgccttggccatttaaaaaaatctacatggatataaaaactatgttcatttatatattttcctttatttgtcttctaaataatattgtcttcttgttaagttgtctcttgtttggtttgtgtagcatctcatatggtatcaaccacgttgtctatagtagatgcccagtattgtacccaattgctttgggttactaccaccatttttaaagtttataatttgtgaagggttgtccttatgtcttaaggaaaatcagagctaataacagctgctaagatttatttagtaggtactaagtggtaagtactgctctaggggctttcgatgaattgattcagttaattctcacaattatcctgtaaggttggtattatttttattaatttttattttttttgagacggagtttcgctcttgttgcccagactggagtgcaatggcacgatttcggctcactgcaacctctgcctcccgggttcaagcgattctcctgcctcagtctcccgagaagctgggattacaggcacccgccaccacgcccagctaattttgaatttttagtagagacggggtttctccatgttggtcaggctggtcttgaactcctgacctcaggtgatctacccgcctcggcctcccaaagtgctaggattacaggcgtgagccaccgcgcccggccaggtgggtattattatcatttctattatgtcaactggaaaacagaggcacaaagaggcttagtcatttgctcaagattgtatacctaataagggatggtgctgggttggaactcagaaggtcttgttctaaattccctacttttcaccattttttgccaataatttatagctctaaaatattgatagttctgtaccaatatatgaaataaagtgttctctccccagaacttagtaaatcttctattttgaaaggcatgtatttattaattcatttagcagatgttttttgagtgcctaacacatgcctagaactctgggatcccaaaggagctttgtgttgtggtgatgtttgccacaatgggattaaggttcagacatagttgatttctccttttagctcatagtggggagaatttctggcagatgactgcatttttttatgctaatgtgtatcatctcatagtaatctactctccacagtgttagaaaaatgtggctctcatattatccaacctcatttaaatttcaaattattctcttccctttagaatattcttacaagctccgttttaatggcaccagcatcagaagatgaagacaatgttctcaaagcatttacagtacctaaaaacaggtccctggcgagccccttgcaggtaattactattccaacattggtattttaaaattcattcactgaaaaactgtcatctttggtggtggtggtggtggtggtgatggtagtgctggtggtctgtttttcgttttcaacattttagacataggggagtaatgcttttatacaattcttgatgtctagaaaaatccaataattcctttttgctactcatatgagacatgctagaaatttttatcagtgcagattccccaaagcatgatgaaatgaaacatttcttactgtgactgagactaagatgtattacacgtgtgtcactatcttcttctgccctcaaatgttttataaaaatatatcaatatagtttactttatgttccaaattttttattttttatgctgtatccctaggcaaccaaagctcagagactgttccaattttaaatgaagtctgaaattagtcagacagaaaataattgcaatgtatttgactgtcagaataagaaagtcaactgtcaatgttgtgaggccgatctgaagttgaccatctgctgtcaggttttaatatcaaaagagatttcccttgtaaccctaaagtgggtgtgtgttgatgaaatataaccaattccaaattaatcctgagccaaatgtaaataagaatgcaaattttgcttccctaaattatttaaagcagtttctgacattaaatagcccaatacccagccacctgcagagccctctcctccatccccctgtgccatgcagagggaaacttcataaccctagaggaagtgaagagcctggattcagaagctgaaggtcatatttcttgctgtaagttaaatggcacgatcataggacagcagcctttgagtctgcccattaccttaaagggatttcccattcttgtgatagtttctccttccaaattgtgagaatctgaaaacttgcccggtaagtatttgtgatgcttagtttttcagggttttttgttgatgttgctttgttttttgaaacagggtcttacccggtggcccaggctggagtgtagtggggtgatctcggctcactgcaacctccgcctcccagattcaagtgattcttatgcctcagcctcccaattagctggaattacaggtgtgagccaccggcaacccagccgtttttttgtatttttggatagagacaaggttttgccatgttggccaggcaggtctcgaattcctggtttcaagtgatctgcccacctcggcctcctacagtgctgggattacaggtgtgagctaccgcacctagccagtgcgtagtattattgtaaaataaggattgcaagcacattttgtttaattaaatcagattgcttccttcctggcctctctctgacagcaattgttttggtaaaatggctgtggactggaatgtgagacagggagtcagtatttatggggaatctggacaagttcctgcgtcagtgaggctggagttggccccgtgtggagaagactcagaataccacaaagaggccagacgcagtggctcatgcctgtaatcccagcactttgggaggccaaggcgggtggataacttgaggtcaggagtttgagaccagcctggccaacacggtgaaaccccatctctactaatcccagctactcgggaggctgagacaggaggatcgcttgaacccaggaggcagaggctgcagtgagccgagatcatgacactgcactccagcctgggtgacagaatgagactccatctcaaaaaaaagaatatcacaaataattgggagatgaggaagagaatgaactccacccagacataagaggaacccagaaagggagttacaaagatttcaaggcaaagggcagccatttcaaaattttcctgaaagctgttcttaggtccagaagaaaagcttttgcttttttttttttttttaattattcccacctaagttacttggctcttggtttctagagaacagaattcaactactgctattcgtgttttaattaagttagattaagttttgcatatattttctaacctagtctggggccaacttgtatttgtagtagtacagaaaaagtctgttctaaatttcaaaaagccaacacatcaatatacttggggacaattaccattacataagttgaaacccatagttcagtattgagctttatcagtatatttgtattttatttaatggaaatattggttatctttgaaactcaaaattaagttatagctctattttattaatctgtattctcctgtctatcagtgagtcatattggcactttatgaattctaacatctgtacactgagattaagttgtgtatggtgaaggtaatatttgtcaattctatcaaactgaataattgagacttgaaagttaattttagagtcaatactcctgtctaaaccatatagtttactggtttacactgaccagatatattttaataatctgctataaagccaggctcagtggctcatgcctgtaatcacaatactttgggaagccaagactggaggatagcttgagaccaggaatttgagaccagcctgggcaacatagtgagactcagtctctattaaaaaataattagctgggctgggcgtggtggctcacgcctgtaatcccagcacttttggaggccgaggtgggcggatcacgaggtcaggagatcgagaccatcctggctaacacggtgaaaccccgtctctactaaaaatacaaaaaaattagccgggcgtagtggcgggcacctgtagtcccagctacttgggaggctgaggcaggagaatggcatgaacccaggaggcggagcttgcagtgagctgagatagcgccactacactccggcctgggtgactgagcgagactccatctcaaaaaaaaaaaaaaaaaaaaaataataataataataataataattagctgggtgtagtggtacatacctgtaatcctagctacttgggaggctagggcaggaggatcccttaagcccaggagttcaaggttacagtgagctatgattatacccctgcactctagcctgggagacaagaccaagaccttgtctctaaaaaaaattttttaaggccagccgtggtggctcacacctgtaatcccagcactttgggaggcagaggcgggtggatcacaaggtcaggagtttgagaccaacctggccaacatggtgaaactctgtctttactaaaaatacaaaaaatagccaggcgtggtggtgcgcacatgtaatcccagctacttgggaggctgcggcaggagaattgcttgaacccaggaggtgaaagttgcagtgagcccagatcgtgccattgaactccagcctaggcaatagagtgagactctatctcaaacaaacaaacaaaaatttaatctgctataatagatactaatttattttaagaaatacttagtgaatgttgttctacatacttgccaattgggaggaaaaaagaaatattcactaaatgaatgaatgttatacaccaagtatctccttcattttatgtcatggagttctagcttctgatatcacagaaatatgtgatttctaaaatgtttcagactattgtgataagtattggaaaatgcatcaagtgactctaaatatttaaacatacatcacctatatttcatataatcctgattcaataatatttctatagattttttatgcaatttggtaattttgtttgtttgaaacacagtgctatttcatatatttctattgataatccaatttgacctaattaggcatatttctcacacatggtattattgaacatattgcacatttattaaatgatatgtattttacttaagagtactttatataatctataatttttgtaatttgtacttataataaatcaaatattaagtgggattttagccaaaccatctagacatttttgtcataatgtttttattaaaacagcaaaataggagtttcaaaatattttaaaatttgaatacttctaaaatgtaaaatgtttgcaactggtgtaatgcagttgattgtctatccctctaaactgtctaaataacttaggttcaagaacagtttattgaagaacataggaactgcgcaattctgtgttttatcatttcagttttaatcaccccggcttgattatggcaacaacattttagacaagcaattattactatttttgaggcccatatactgggccattatggttttgcttctaacgtacatataaatgcacatgcaatatatataaattatgtttgctgttttaaaattagaaatgccgagaagctatgtgtttgacattttattataaattttgtacacacatagatgtatggaaaatatactatgttctagagtcaacaattgttatcattttgccatatttacctcatctctttttttttttttttgagatgaaatctcattctgttgcccaggctggggtgcagtgacgcaatctcagctcactgtaacctctgcctcccaggttcaagcaattctcctgcctcagtcccctgagtagctgggactacagatatctgcctggctaatttttgtatttttagtagagatagggtttctccatgttggctaggctggtctcgaactgctgacctcaagtgatccacctgcctcggcctcccaaagtgctgggattatagatgtgagccaccacgcctgggctacctcatctcttttttatgaagtttttatttttattttttaattttttttttaatttttttttttttttgagacagcgtcttgttctgtcacccaggctggagtgcagtggcatgatctcggctcactgcaacctccacctcttgggttcaagtgattcttctgccttagcctctcgagtagctgggactacaggcgcttgtcaccatgctagctaatttttggtatttttagtagggacggggtttcaccgtgttagccaggatggtctcaatctcctgacctcatgatcggcccgccttggcctaccaaagtgctgggattacagacatgagccactgcacccggccagttttttattttttatttttttgagacaaggccttgctctgtcacccaggctggagtgcagtggcaagatcatggctcactgcagcctacctcctggactcaagcaatcctcctccctcagcctcctgagtagctgggactataggcacatgccaccatgcccagctagtttttttttttttttttagagatggggtctccctgtgttgcccagcctggcctcaaactcctgggctcaagcaatccttctgccttgacctcccaaagtgctgggattacaggcaggagccaccctgcccagcctgaagtattttaaagtaaattccaactaatataacattttattctcatgtacttccagatgtgtctctaaaaatagacatttttatatataacctaataccatcattacatatttaacaataattctttaatcttctcattctcaggtatatttaaattttcccattaatccaaaaaagaatcaaaattgaaacaatttcacacattgcatttggttaagcctcttaaatctcttttactctctagtccagtgctgtctaatagaacttctacagtgatgtgaaggaaatatctaatatgctgctatccactatgatagccagtggcttttgagcacttgaaatatggcaagtgctgctgaggagcagaattttcaatttgaattaatttaagttgctttaatttaatagccacatttccttactctcttactggaatcagccatttccccatggtgctctgaatcctcttagtgagaaatggtacatagacaccaaaatcagggtgctaagtctgtccattgttatgtggtttgtcattgagatacaaataattttttttgttttgttttgagacagagtctcactctgtcacccaggctgcagtgcagtggtacaatcttggcttactgcaacctccacctccttggtccaagctattctcctgcctcagtttcccaagtagttgggattacaggcacccaccaccacactcagctaattttcgtatttttagtagagacatggtttcaccatgttggccaggccaggctcaaactcccaacctcaggtgatctgcctgtctcagcctcccaaagtgctaggattacaggcgtgagctgccacacctagccaagactcagtgaattttaataatccagagctctccatgtatcccctaatctataatctacagtgcttaaatagaggcttttataagccattatgtacactcatgttatgtttgtttttttaattacttagtctttttccaaaaggaatttgcaacagctacataatcttataattgttatgtttcttttatattttcacagttgttttaattttaaattgtaaaagcaaacaggatattcttataataaaaatgttctgagatgtttttcatatttgtgtctttcatgtggctcagaatatatgagattttcatgtcatatcattgtcagtattcagccttttctccacattgtgtggggtagaggatagagtctagaagcttataaaatggtcacaaatgaggaagtagagaaaacattcagcctagaaagcgtgcatttgtggtatgaaaggcactgtggaatgctgctggattctgcccttcagtagttacccgagagagaccgaggcagacgcatagctccctcctcagcaaggagaaaagagttgcctgctttcctcagcgtgctttccatttcctttgttttgaaaaaagcacattatgctaatcaactttccttaaggtagacatttttattggtagatcaaaaaccgtgctttaagttataagccttctgaacttctgtatttttctcttaaattataatttccttttattcctatttaaaacccaagtgtaaaagatgtgttcataggctttctactcactcacttgcctctttttcgtaaccacagaatgacagccttaaattttaatttcctgacttggcttgcccatggcctgacttttttaaaacaaggagtttaagttaaagaaatttctccagccattattatttaaacacatttacacagtatcaaagaatttaaaaatgttgctagcagttgatactcccctcagctttcggttcagcgtgttttagattgctcctattttgttatttgtctatgaacttttatatttttcaaaaaaataaggcaagccctttttgcctgataggcactgctgagcagtataataaacaagcatgggggcaacagaacctgggttccaggctagactccactgttttcaaacggcatgactttaattcatcaagtgaacacaattaagcaaagtataagtttgggaccatggaatatccttcactcatcacacaggttactgtgaagatcaaatggatataatattgctttcaagatggcggcacacttgccactatacacaggtgatattattaggcagagtcgccacatagtccctgtccttgaaatgcaggcaaggagccctcaccaaaggccagggtggttttttgtttttcgggtttttgtttgtttttttcattgtggtatattatttcctctggcatgctattccctgtcccactcttacagaactgtgtcagtgggtcaccaaaagagagagctgattcaactgattccttgaaataaaggtagtcagacctcgcggtatgatggagatgaagcaactgatttactggttttctctatttttctgctgttcgtgttgtcatttaaacagacatggaaaccgtctgcacacgacagagatctttccgagcctttttcatctagtgtgctgtgctgacccgctcccctggatgcctgcacactcatttggttctcccttttggtcacttttttccacttaccctggcagaaattcacgtggctgtcagtagtaattcagtgacctgctttcaaaaaatgttataaattaagcagcttttctgtgtatagcttttgggttgaactgagaagggctaagtgaagggagaagctatgttgagctcagagtcagaatgccctgccccagacattttgagatgtgaatttttcatttgttttgtttggtgacacttagagagaataaacattctgagataaaaatcttccttgggcaggccagcaaagatagaattgctttagagcaatttggcacttggtcttaatcttaatagtttggaactcatatgtgactaaggaaaaggatattgcaaaaagttgtgccaccctaggctatatgatataaacttagaaagtctatcaacgtgaaaggtgaagagacctctagagacatcggggacaaactccaaatttgggaaaggtccatccacatttgcaattgttagttaggcttgggaagtggagtcattggtggatgaggcaacttccaatcaccatctcgatttttatttccctaacttttaagattattttctatagaaaatcagtagtgctgaagttggagtcatttaattgatttgtgccaacctagggaagcatttactctcgagaaaagtttggtaaccattaatcttaccttagcaacatttcagtttaagcttatctctgactttccaaagacaactaaagatttctacagtctctcttataactgatccattttttcaaaagatgtccctttgggaaggaattctcatttttagaattttagtccagaggaagtatttttttttcagataggtgaaatagaataagcagaaaattcttattttttactgttttatataccattgatgcctgcttattttaaaacaaaacacaataaaaacatgataccatctgatgagttgctttggttttactttttttttttttttttttttttttttttttttagtttatacaagtttcttattaggtcagcaaattgtaaaacacataatttgccaaggcttttgaagccagcagatactgggtgaagttgctgtatgaatataataataagaaccgtttttgttcagcttgatgaaaaaactattcatgttctaaatgaaaatgtgaagatcatctaattctgacagaaaaccacctgtggacatggtcttgtttctttttatttcttctgttttctacaaaagatggcaatatttatttaaagtgctttaacaggatatcccagttaaagctttgacagactgtttatagttcacttctgcccaggggcaattaaaggcacattacaggataagcgagatgactccccggccacaggaggaggatgtgtgggtaggattattaatgttgaaatgaattatgatagagtgacatgtctgcaagagcaccatgggttagtaacttaacaagaattcatatgcagaaacccataattctcagcagttctttagggtaaatgaaactaaagtttagggagagagaacaaggagaatttgcaaagatatgtatgacagtatttaaaaatgttcttccagcacaaagacattaatcttcctttgtcaaaataattctttctgcatgaaaagttggcatggggctcccaggcttcaggtaagatgggagaaagggagcgtttctttttttttgtaccaaagtactcaatcttctgatcttccttgactttcacgacataggcatatgtctactctgaccagtttgtttcatttattgtggtaagatgtgcttgtcttgtgctttcctggtgcagaaaaggagctgcctcgctcatgcttggtggcctttttgttcctacacacagtggttctcgtacatggtggctaccacatcctggtgtttgtctatactgggagaatcaggcgttccaagtcatcttggctgccctagctctgagcttcaggggatatatgactcagaaatgctatgctttctggaatttggatatttcatttttatttgtttcttggtaaattctcttttgacttaggagaagctaactatttggaaaggtctctcagaactctaattacaaatatatggtaccttctttatattgatctcatttttaaatacctagtcctggaggaagagctaaatatgaatacagtgatgagctgtgtaggggatctcacaggaacacagtcagatttcaagttgaaaatagattcagttgataatacttagtactagattctcctgaatcgactttgggaattctgagtcaacctaaggactatattacaaaggatcagaccttgacttttaggccaggtgtagtggctcatgcctgtaatcccagcactttaggaagccaaggcaagtggatcacttcagtccaggaggttgagactagcctgtgcaacacagcgagaccctgtctctaccaaaaatacaaaaattagccaggtgtagtgtagcacctgcctgtagtctgagctactgaggaggctgaggttggagaatcaactttaaccccggatatggaggctgcagtgagctgtgatcatgccagcctgggcaaggagcaagaccctctctcaaaaacgaaaacaaaaaagacacagaacttgacttttaacaggaggcatagtaatagcaagcataagattgttttaacatagcatttaagataatttacgcatttagaaaattaattctggctggttgtagtagcttatccttaatcctaaccctatgagaggccaaggcaggaagatcacctgaggccaggagtttgagaccagcctaggcaacatagcgagacccccgctctctacaaaaaattttttttaaaaaacatagctgggcatggtgacacactcctgtagtcccagctactcaggaggctgaggcgggaggcttgcttgaggccaggagtttgagggagctgtgatcacgcccctgcactccagcctgggcaacagaatgaggccctatatctaaaaaaaagaaaaatggacaagaaaattctatattgattgaagcccagctaaatagaaaaaaaaaaattctaataggccattttaaagactttggaaaaattcttagctagagtaaaacagaagcaatcctttctttcctggttctcacatctccattctcaccttcattccccttcccctccatttgtttcaagtatttttcttttctatgtgtgtctttatgtaaatttaaatttacctacaagatattatgatattaagatatttcattctgcttcctgttttgtcacttgttctttaagatccaagtccttggctccatgtgcatctaatccttgccataagccctgcatcgtacttcatattcaccatattgaactattcaccctcaagtagtcactattaaatgtcacactgttgtagcgactacaaatgcaagctcagtaactgaaaagataacattaaattttgttttttaattggtttcctgtgtcaatttcatgtttcgggaatttgtatggacagatagacaccagagagatatgcgtatttcacctgcatgcttgaggctagagaaacatgatttattcagaactatttcaaatactgtaactaacctggtaattttgtttaggaaaacattaaattcggaatagaaggcaattcagaatacctgtctgttatctttgtcttgtcatttttgagatactcagttcctggaaaatattatgataatccatcttgctatgtagtatttcaagttatatgttgagcctctgagcttgcagagtgaacatttctattcatagacagtgctgttgacatcagtggggagatggcacaagctttgtgccctaggaaagtttaaaagctagaacattacactgcaaaccctatgtcaggaaactttgttgcagcaactaggcaaggaaaccctaccactgtacccataccttgttttagtagaattatgtttctttgctaagaagtctggtgactctcacaccccatctcagcactttcctggattccaaggccctggtgccctgagcacacaacttcccaggttccttttattgtttctgataagaactcgaattagaggcagcgtctggtactcaccaggggtgtggtcccatgggtgacattcttgctccatcatttcttacccaggtaaccttgagtatggcgcctaaatcctctcttcctttcaaattgcctggtctgtaaaatggatgcagtgaatggtagctatgccacaggtgttttgtgtgagaattaaatgagaggagttatatcaataacacttagaggcatgcggtgcctatagtgagggcttgttttatgttgtcgtttaaccctttctttctcagccctcccccactccacatcccctcccactggcaatgtacaaattgcagcttcctgcctctttcctgctatctcgctccctggatgacatccctgcgtttccacctctctctcccctaatcttagctgttttcaccctttccccacagcattgccttgacagttcctcagtgtcccatcccctcttcccatggacaacaccacaaacctgcgcacacggcctgttattattcctcctgtttcacctgtgtccattctgtctcataaaggacactgtaggctctgaacagctaaggcctttcttattcttttgtcccatggaaaataatccctccagatagcaataccaggaatagtgccttttctaacccactggtttccttttgagcttacagccaccaaatcttatatctgtttgtttctgttcccctctctgcattgactgctagagagatcagagtcaagcaggaggttacatctagctggggcactgtgctttatgctggtgtttcgtgtgcaaatctcataccatcttcatgttacagttgttccttagtgtccatgggggatttgtttcagaacccgcaaggacaccaaagtccagggatgctcaagtccctgatataaaatagcattgtgtttgcatataatctacacacatcttaccatataattttttttattatttgtatacattcgtggggtacaagtgtaattttgttacatggatgtattgcatagtggtcaaagtcgaggctgtgagtgtatttatcgttggaataatgtacattgtacccgttcattcctgtatactttaagtcatctctagattacttataatagctaatacaatgtaaatgctatggaaatagttgttatattgttaggggataatgacaaggaaaacacctatacatgttcaatacacagcaattatttttttctgaatatttttgatctgccattgattgaatctatggatgtggaacccacagatatgggacccacagatgcagagggccaactgtgtttattttttccaaatttgtttccctgttatgactcttctttatacacatttttaaactctgttgtcttgtatttcttttctaatcatcttacgtccttttggaaaccaagtggggcataaatagtacatgtttgcatttgaggcaacacagaggcatcgcaggagctggagacagcaaagttcaaagccagtccaccacttacctacagagtggccttgggcaagttacctccattttctgtctccattctcgagcctgtctagagagagaatgaacctgcctcccgaggtgatggtgctgttttaatgaaataatgcatgtgaaatgtgaagtgccactgtccctggcatggagatgctgtccttagatattaggtccatcttgtatcttctagtgtatctttaaaaattaaactatactggcttcatgcctgtaatctcagcactttgggaggccaagaccggcagatcacttgagtccaggagttcaagaccaacctgggcaacatggtgaaaccctgtctctacagaaaatacaaaaattagtggggcttggtggcacgtgcctgtagtcccagctgcttgggtagctgaggtaggaggatcacttgagcccaggaggctgaggctacagtgagctgtgattgcaccaataccgatcagcctggtatgacagagcatgactctgtctcaaaaaaaaaaggaaaaaaattaaactatactgataaatatttctaaagtaattgatgaaaacatatatatgacacttagcaggtgttgatcaattccagtgcgtgcatgagctgctttgcactgtggctacagcactcagcagtttgcttagtgagtagatggccatagctcactttaggtatctggagaataatgctcattcctgtctccagctttgtaaaattgcctaatagacggaaggcattaaaatatgaagatgggattatatcttatgaagctgcttggaatgggttttccctcttaacaaataatttctgatcatccatatcccttaagaacaccggatttctgggggccagggaggtaagattctatctgacaaagccttcctggtgtcaaccacttgccatctgttggtcagtgctggccctgctgggtctatagaatgagcttctttgtctgacgctcctgttgccatccctttctccatcagccttgtagcagtacctgggaacctgcatcctgtggaaagatggaggagcagatgacatcttccagtcaagctcgtaaatacgtgaatgcattctcagcccggacgctggtcatgtgagacatttccagaaaagcattatggttttcagaacacttcaagttgacttgggatatatcattcctcaacatgaaacttttcatgaatgggagaagaacctatttttgttgtggtacaacagttgagagcagcaccaagtgcatttagttgaatgaagtcttcttggatttcacccaactaaaaggatttttaaaaataaataacagtcttacctaaattattaggtaatgaattgtagccagttgttaatatcttaatgcagatttttttaaaaaaaacataaaatgatttatctgtattttaaaggatccaacagatcagtattttttcctgtgatgggttttttgaaatttgacacattaaaaggtactccagtatttcacttttctcgatcactaaacatatgcatatatttttaaaaatcagtaaaagcattactctaagtgtagacttaataccatgtgacatttaatccagattgtaaatgctcatttatggttaatgacattgaaggtacatttattgtaccaaaccattttatgagttttctgttagcttgctttaaaaattattactgtaagaaatagttttataaaaaattatatttttattcagtaatttaattttgtaaatgccaaatgaaaaacgttttttgctgctatggtcttagcctgtagacatgctgctagtatcagaggggcagtagagcttggacagaaagaaaagaaacttggtgttaggtaattgactatgcactagtatttcagactttttaattttatatatatatacattttttttccttctgcaatacatttgaaaacttgtttgggagactctgcattttttattgtggtttttttgttattgttggtttatacaagcatgcgttgcacttcttttttgggagatgtgtgttgttgatgttctatgttttgttttgagtgtagcctgactgttttataatttgggagttctgcatttgatccgcatcccctgtggtttctaagtgtatggtctcagaactgttgcatggatcctgtgtttgcaactggggagacagaaactgtggttgatagccagtcactgccttaagaacatttgatgcaagatggccagcactgaacttttgagatatgacggtgtacttactgccttgtagcaaaataaagatgtgcccttattttacctacttttgttttctctcttatttgtcactatggacaacagttacactttaaagaaaatggagcagactcaaggcactttcctctaataattgcacaccatatgcacttcgtgtgaagaagccaggaatcattacaatggaaaagaaagaacaagcaaactgagttaaatagttcacaaacaatcacatggacaatggggaggaatcttccagaatgcatcagtcagggtctagcggcatttgagtgcggatgctgtaaggggaattcgttcacaaatgtactgataccacagatgtgggcaggggctaggagagcaacagggtgcaggcctgaaggcacctggaaggccgcctggagggggacagtcaggaaagcaggagcccttgagaggagcactagcctttgatgagaccactgccatcgaaggagacctcacagggagggagccaagggtaaaccctaactttgtttccccatttctcctatctctgcctaggggtcctcactggcagaaccaaccagaagctggaggacaagggagctcccatatgggagccggcctgtgagccttcaagggtatgcggagtcgtttgttcaaaatag

SEQ ID NO: 857 - DNA, 5851 bp, Homo sapiens
  source 1..5851: mol_type = genomic DNA
aaggccttatatcgagtaaacggtagtgctggggcttagacgcaggtgttctgatttatagttcaaaacctctatcaatgagagagcaatctcctggtaatgtgatagatttcccaacttaatgccaacataccataaacctcccattctgctaatgcccagcctaagttggggagaccactccagattccaagatgtacagtttgctttgctgggcctttttcccatgcctgcctttactctgccagagttatattgctggggttttgaagaagatcctattaaataaaagaataagcagtattattaagtagccctgcatttcaggtttccttgagtggcaggccaggcctggccgtgaacgttcactgaaatcatggcctcttggccaagattgatagcttgtgcctgtccctgagtcccagtccatcacgagcagctggtttctaagatgctatttcccgtataaagcatgagaccgtgacttgccagccccacagagccccgcccttgtccatcactggcatctggactccagcctgggttggggcaaagagggaaatgagatcatgtcctaaccctgatcctcttgtcccacagatatccagaaccctgaccctgccgtgtaccagctgagagactctaaatccagtgacaagtctgtctgcctattcaccgattttgattctcaaacaaatgtgtcacaaagtaaggattctgatgtgtatatcacagacaaaactgtgctagacatgaggtctatggacttcaagagcaacagtgctgtggcctggagcaacaaatctgactttgcatgtgcaaacgccttcaacaacagcattattccagaagacaccttcttccccagcccaggtaagggcagctttggtgccttcgcaggctgtttccttgcttcaggaatggccaggttctgcccagagctctggtcaatgatgtctaaaactcctctgattggtggtctcggccttatccattgccaccaaaaccctctttttactaagaaacagtgagccttgttctggcagtccagagaatgacacgggaaaaaagcagatgaagagaaggtggcaggagagggcacgtggcccagcctcagtctctccaactgagttcctgcctgcctgcctttgctcagactgtttgccccttactgctcttctaggcctcattctaagccccttctccaagttgcctctccttatttctccctgtctgccaaaaaatctttcccagctcactaagtcagtctcacgcagtcactcattaacccaccaatcactgattgtgccggcacatgaatgcaccaggtgttgaagtggaggaattaaaaagtcagatgaggggtgtgcccagaggaagcaccattctagttgggggagcccatctgtcagctgggaaaagtccaaataacttcagattggaatgtgttttaactcagggttgagaaaacagctaccttcaggacaaaagtcagggaagggctctctgaagaaatgctacttgaagataccagccctaccaagggcagggagaggaccctatagaggcctgggacaggagctcaatgagaaaggagaagagcagcaggcatgagttgaatgaaggaggcagggccgggtcacagggccttctaggccatgagagggtagacagtattctaaggacgccagaaagctgttgatcggcttcaagcaggggagggacacctaatttgcttttcttttttttttttttttttttttttttttttgagatggagttttgctcttgttgcccaggctggagtgcaatggtgcatcttggctcactgcaacctccgcctcccaggttcaagtgattctcctgcctcagcctcccgagtagctgagattacaggcacccgccaccatgcctggctaattttttgtatttttagtagagacagggtttcactatgttggccaggctggtctcgaactcctgacctcaggtgatccacccgcttcagcctcccaaagtgctgggattacaggcgtgagccaccacacccggcctgcttttcttaaagatcaatctgagtgctgtacggagagtgggttgtaagccaagagtagaagcagaaagggagcagttgcagcagagagatgatggaggcctgggcagggtggtggcagggaggtaaccaacaccattcaggtttcaaaggtagaaccatgcagggatgagaaagcaaagaggggatcaaggaaggcagctggattttggcctgagcagctgagtcaatgatagtgccgtttactaagaagaaaccaaggaaaaaatttggggtgcagggatcaaaactttttggaacatatgaaagtacgtgtttatactctttatggcccttgtcactatgtatgcctcgctgcctccattggactctagaatgaagccaggcaagagcagggtctatgtgtgatggcacatgtggccagggtcatgcaacatgtactttgtacaaacagtgtatattgagtaaatagaaatggtgtccaggagccgaggtatcggtcctgccagggccaggggctctccctagcaggtgctcatatgctgtaagttccctccagatctctccacaaggaggcatggaaaggctgtagttgttcacctgcccaagaactaggaggtctggggtgggagagtcagcctgctctggatgctgaaagaatgtctgtttttccttttagaaagttcctgtgatgtcaagctggtcgagaaaagctttgaaacaggtaagacaggggtctagcctgggtttgcacaggattgcggaagtgatgaacccgcaataaccctgcctggatgagggagtgggaagaaattagtagatgtgggaatgaatgatgaggaatggaaacagcggttcaagacctgcccagagctgggtggggtctctcctgaatccctctcaccatctctgactttccattctaagcactttgaggatgagtttctagcttcaatagaccaaggactctctcctaggcctctgtattcctttcaacagctccactgtcaagagagccagagagagcttctgggtggcccagctgtgaaatttctgagtcccttagggatagccctaaacgaaccagatcatcctgaggacagccaagaggttttgccttctttcaagacaagcaacagtactcacataggctgtgggcaatggtcctgtctctcaagaatcccctgccactcctcacacccaccctgggcccatattcatttccatttgagttgttcttattgagtcatccttcctgtggtagcggaactcactaaggggcccatctggacccgaggtattgtgatgataaattctgagcacctaccccatccccagaagggctcagaaataaaataagagccaagtctagtcggtgtttcctgtcttgaaacacaatactgttggccctggaagaatgcacagaatctgtttgtaaggggatatgcacagaagctgcaagggacaggaggtgcaggagctgcaggcctcccccacccagcctgctctgccttggggaaaaccgtgggtgtgtcctgcaggccatgcaggcctgggacatgcaagcccataaccgctgtggcctcttggttttacagatacgaacctaaactttcaaaacctgtcagtgattgggttccgaatcctcctcctgaaagtggccgggtttaatctgctcatgacgctgcggctgtggtccagctgaggtgaggggccttgaagctgggagtggggtttagggacgcgggtctctgggtgcatcctaagctctgagagcaaacctccctgcagggtcttgcttttaagtccaaagcctgagcccaccaaactctcctacttcttcctgttacaaattcctcttgtgcaataataatggcctgaaacgctgtaaaatatcctcatttcagccgcctcagttgcacttctcccctatgaggtaggaagaacagttgtttagaaacgaagaaactgaggccccacagctaatgagtggaggaagagagacacttgtgtacaccacatgccttgtgttgtacttctctcaccgtgtaacctcctcatgtcctctctccccagtacggctctcttagctcagtagaaagaagacattacactcatattacaccccaatcctggctagagtctccgcaccctcctcccccagggtccccagtcgtcttgctgacaactgcatcctgttccatcaccatcaaaaaaaaactccaggctgggtgcgggggctcacacctgtaatcccagcactttgggaggcagaggcaggaggagcacaggagctggagaccagcctgggcaacacagggagaccccgcctctacaaaaagtgaaaaaattaaccaggtgtggtgctgcacacctgtagtcccagctacttaagaggctgagatgggaggatcgcttgagccctggaatgttgaggctacaatgagctgtgattgcgtcactgcactccagcctggaagacaaagcaagatcctgtctcaaataataaaaaaaataagaactccagggtacatttgctcctagaactctaccacatagccccaaacagagccatcaccatcacatccctaacagtcctgggtcttcctcagtgtccagcctgacttctgttcttcctcattccagatctgcaagattgtaagacagcctgtgctccctcgctccttcctctgcattgcccctcttctccctctccaaacagagggaactctcctacccccaaggaggtgaaagctgctaccacctctgtgcccccccggcaatgccaccaactggatcctacccgaatttatgattaagattgctgaagagctgccaaacactgctgccaccccctctgttcccttattgctgcttgtcactgcctgacattcacggcagaggcaaggctgctgcagcctcccctggctgtgcacattccctcctgctccccagagactgcctccgccatcccacagatgatggatcttcagtgggttctcttgggctctaggtcctgcagaatgttgtgaggggtttatttttttttaatagtgttcataaagaaatacatagtattcttcttctcaagacgtggggggaaattatctcattatcgaggccctgctatgctgtgtatctgggcgtgttgtatgtcctgctgccgatgccttcattaaaatgatttggaagagcagagactgtgcctctgtttgactgggtttggtaggagtcattttctgcttgctggtgatcactagctgggcagagaaaaaccaaggcatttgtctatgatgctgtccaggaagcctcattcaacaagctgcctaagtcaacctcttcttggaataacctctaaaagcttccgcttagcaggctatgctgagggccaggaaaacccacctaccagcttggacccctcctctcccactctcatgccacgccacgggaccacccataacaggagcccacacacatgggtggcagtgacctgcggcagacagggaccacacagcaagtgtccccaaaatgccacccactgtctcctgccctccaggagcatttcctttgcctctcctctcagactgggtttccactgaaactgtgcattgtctcacaaattcgtggctggggaccacccaccactctgctgcctgatccagccccacgccagccctttgaggtgcccaagctgacaccaggagcaaggttgagaggaagctgtgaccccagcaggactttatgttcccaccatcccggatgtgagaatgaggaaaaaaggagatgagctgtctcccc

SEQ ID NO: 858 - DNA, 24797 bp, Homo sapiens
  source 1..24797: mol_type = genomic DNA
gcgcggcaagtcccactgaggcccggggaggcccagggcctggccttgcggggggatccccaccgcctcacccccaacccacccccggcagcccaggccgcgcgacccacacgcccgcgtcgctcctcgctgtgcgcaccgcgctccccgcccccgctgccatcctgccacgccccgggcgtcgggggcacagcccgcgcccccccgcaccccgcccctgcgcagaggctgggggcctgtttatctggaggcccccaccccccctccaccccggggggcccgctccccccgcgccccggggagctctggggccagataagctggcaagctggcacggcgccgcgcggcggggcggagaggtcagaggcgggggggcgcgccggggcgggccggacccccccccccgacttgacaaaacctaataacagcccggtctccccggcgcagcgggcgaagccccacgggagggcagagacgtggcaagaggggacctgccgagcctgttctggcctccgaggccaggctggggggggcgggctgggcgtgggggggccggcggctgcggcacctttaagacaagggaggacccctcttgccctcggagaaaccaggaagggagtcgcgagcatcatacggggctttggctgtactgtacagttactgtaggggcagtgacgccgccgccgccgcgcgagggagcgaccagggcagcgcgacgcgggcagagcgagcgccgcggaccccggaggcgagcggccgagggagcccagtcccaacttcgggccccggccccgcgcgccccggcccggccccgcgaggtaagtcagcgcccggcgcggcccccggcacggggtgcagggcggggacgggcgggggtcgctgcggccaccgctgccccctcgggaaggggagatccggggagccggggacgttcccccaagtttcagaggaaggggtggttggcagctgcccggaggctggaggcgccctggatcccgagcgcggggagggggcgccgcccgggaaggggggattgggggctaagtgcatgagcttgtgcgccagccccccccaacccgggtgcatggcttttcggggctcccaggcgcgcggggagcgggggaggggaagcagggctgcattgagggtggggggagccggcgtggggagataggggggcgcgtcgcctgctaagtttccagctgaagacgaggggcgctctcgccccccgggggcctattcggtgctgcgtgcatacgttggagttggccaggattgagctccatgggggatgggggggagggggctgaaaaaacagggaggggggcttcggaaaggagggggaaggggtggggtgtccgggtgggcgggcagggccgcagggacctctgggcttcgtagtccctccgccgtttgcagccggcaggtggcaagcggcttggactacaagtcccagggtgccccgcgccgacagcccgccgcggcctgcgggtaggggcggtgcggaggaggggcggtgagcggcgggccggagagccaatgggcgcgggccgatcgcgcggcgcggcgcgggggcggggccagcccgccagggggcggggcctggagccgggctcccctcgccgggggccggtggcggtcccggcttccggctgcgcggcccgcgggccggccccctccccgccccggggcccctccccgcctggttgtgtaaccgtccccagcccccctcccctcggccccccgcccgtggggggggggtcaccctccccgcgctccccggggagggcggcggcccgggcggccgcgcggtgcaggcgagcccggggatgcgcggcctagcgcaggccgggcccgggcgtgggggaggcgggcgggcggacccagatccggggtaatttgcatcgccctccccccagcccgggtggggattggccgccggcggcggggggtggcgcggggccaggctcactgccgcctcccggcccctcggagggagccagcccagccgcagccgccgccaccgccgccgccggggccgggccccctcgccgctgccccgggaaggaggtaggagccccccgcgcgggcgaggcggcgggggaccgcgggccgggcgggggccgcgcgctgcggccggggcgggggagggggccgcttcctgcccccgcccgggcctgactcagccccgggtggggggcctggcctggcccctcgccctgcccggacggccgtccggctccgacccgcgggagggggcggagagagcaccccagtccccgccgtccgcgcccccaaagcgcgtgaccccgtctcctctggcccggaccccccctcctttcccttgacgccaccaccacgtgcgaagcctgagcccgggcaggggaggggggagctggtgggatccagccccctccctcccgctccctacctcccgggcgggagacccagcccccccggcctgggagcctggctgggggctgagcggagcggaggagcgggtgcccccccagggaccgggcctctgcgggttctgggaggcgctgcccgggctggctggcgggggcgcacggtgggccgcggcgggaggttgctgtccacccgggcccggacacccagtcggcgcccactaaatgttggcggaatgcagccaggagttggcggcgaggcggggggaggcagcaactcctctccccccagtcaggcggcggaagtcacagaggtgctggtgcccctgccacccgcggcacccacctggctcacccatgggtggcgggctcggtgggcccccccacctccctgccagctgcctccggagagggcgtggggattccgtgtcagtgccccccgccccaacctcagaactggaccagggcgtaaccctgagcgtgccgctcccacactgggggtgcctccccaccaccggccgatcacttcctattggcaaactggtctgggagaggtcccggggaggccaggctggggcaggggcccaggccaggccaggcctaagcccagccctgctgctgccagggcctgagggcttcaggccgggggcgtttgtccgcgagggccacccgccatggggccccgagagcacctatcggcggggccggggcctctgtttaccaccagccatcgctgtggagacagagcttgggggagaagggggggcaggagccggccgctggaaaagcgaagtctaaggaaggaaagaagagccaaccgggacactgaaattttaattcgtgggtcagtccggggggtatttattattcagttccgattggctgcgtggcggccagtcagcacctgggcccgggcgggcagccacgcatcggcagaggcccgcgggcggccgcaggcagtggatgggtcctttgctctgtgcgggagactgaggcgcggccgaggcagagcccagcctggggcctggtcggaaaggttcctggggcgatcacaaatccctgctgggtgtttgtttgtttgtttgttttttccttttctttccttgagtccctctgacctatagctgggtccacctggtggcagatccccgttgccatatgaggaggaaaccaaggccgggaggggaggtcaaatgtgagcctggaaactccggaggttagagcaagcctcggagcaggtgccggtactaggcaggggagactgaagcgtagggggaagcagagagcggcccaaggtcactcaggtggggtcagagctgccccctgtgctccatccttccagctcggggcctgtccaaagtcccctcccactgtgtggtggcccaggggcgcctgcccacctgtctttaagcagggccggaggttggcagtagaggctcaactgcaggcacctgcctgcaaatggagtgtcaccgaggcttattaaaccctgtgtccgaagatgacattgaggctcagagagggccagcatggctcccaaggtcacacagcacgagccacagccctctcgcctccctgcctcaccgggcaggccctggctggcgcacgtgcatacgaggcccctctgcaatcctgccgagccacaaactcgtctcaccttggtcctcagaggcgggcagggctctgggttttatgaccagaggagaccgaggtcacctccccagagccagcccactgcagcccagatgctccaaggagggctcctcaagggttggaatgctggcacgcttgctctgcgaccttggatgagccccgtgacccctgcagccggggcgcgctgtgttcctggggctgtggagggtcccccagctgctgcctgcaaagccacccgtggtgtcttttctcctccgcggcggaaactcccaggtcagctcagggcatggcagagacctgagtgtggggtgtgggtcagaactgcgtgagacacctgcacccccacctgtcacctgccagaccataaactgccctgcagtagccctgggcaacaaggacaagaggaacgagcttgggtgggggtgagccttgggtgggggtgagcatggtccagtcctagcccagcccttgggtccaccccagcagtcactccccctctgccagcctcagtcttcccatccagacagtggggagatggtcatcagccctagagtgttgtctcgagggttcgctcagcggctcattgggaatgcttgttgagcgactactgtgcactgtgtcaggcccctgcggagctgtcttgagagctggaggggcagaggcccctccctgagccacccatgtcagctggactccagccctgccccaggctcctgtgtgagagctcccttgcaaggcagctctgagggtatgaggataagccgtccttcctctcagcccccagggtagggggatttcatctcctgctggtatccgggggccaggaaaggggatggaaggagccgtgggaggactagttaggcaggccagagccagacagacggcccgtgctcaaattccagttctgctgcgcgaccctggccaagctgctccccctctctgatcccgttccccgtttgcaaaatggggcacagacacagatcctgccttccagcgctgtgggtgccgtcacgtaccgtgggtctctggggcgattatcaaggcccagcctcccccagctgctccgaggagcggctctggcccttgggccccgagcgccgagtccagagccccaaagcgcagaaggcgcccctcagagaatccggcgctcgggaggagcgtggccaaaggaccagcccctccatctgtccccccagcaggctgtggacggccactcggtggaagtgtcgccacccacgcctttctggtttgactggaaaacaaggcccatcccacctatcaggatgcctgagagaaggatctggccggattctgcaggccgccaggctcccaggctgagccttccacctgctcaggcgagagtgggggtggggcaggtatctccaggtgacaagcaggcctccctcaggggagggagagagaggtcacctcggcctctcacaggcatctcagctaagcaggtgcagcctgggctgatggcagggtggacaaggatgggcttccgagagtctggccttgcttgcccccagtgacgggaagctcagcccctccactgtcgtcatgaagcttcctcttggaacctgggctcgggctgtagtctgggcttcctggcccatgacatctcagagtgtgggaacagggtgggcctcagtcccgcccatgagttgggcgtcagatgggatccccctggcctcctcatcgctgcccccatccccgctgtcacacttcccactgggtccccacggccttcctgcctctggccctttaaggcccaggcaggaagcccctccccatttagggcaataaatggacacgtaaaatggccgagggcctgtttgctccatgtctggcccagagggaggcctgcgggcgagggcaggcgggcagggggcgggctggcagctggcagccaccccaggccgttggtgccccccgatcgggacactgcattcctgtcccattaaacccaggccgaggactgggccaggcggggcttggcaccaggtcagggcggggttacccgtcgggaccaaccttgcaacacaggccgctgggcggggagggggcgggggctgccgggtgcgggcctggcagccgcacctgcacaccaggcttacagtgtgaccttgggccggccgcccaccctctctgggcctgatctccccttccagcttcctcctcaggccccaccactcactcccttggtaggtgaggaggggactgaattcccggaatagcattcaggagcaaagttcccatccgtgaggggtggtgaacagcctggcaatgtgttttggggactggctctggcgcacattaggtccctgggctaagtttgctgaatggatgtgagcgggaccctgaccacagtggggggcccctttccactgttacgacccccatcccccaggagacagaggctcagagaggtctcgcatcttgcccaaggtcacacagcttggaggtgggggagccgaggcttgaacccgagctgctctgcacagcacatgaggggtgagaggtccctttggcctccttccctgctctccctgggcagagggttgggtgggggccctgatcccctcattagacggccccctgctccaggaagtgaccttcgggaaggtggcgggtggcagttacctgcccagccctcaccttgtcgtgtgaccttggggaggcccctggctcccacaccctgcactagcgatgcagcctcctctctgccggtcccccttccccggtcgcccacctccaggcctcagttcctgatgctccccgtgctggggtgcccttcttgggatgccggggtccttcctaggcgacatctgctgctccctgagccacgtcagggtgcttccgagctcacgacacatcccccgcagctgggaagtggcagctgcccagatcagagggctgctgtgtgacctcgactgggccgcctcacctctctgagcctctcagggacctggggaagacgaagtgaaggtgcccagttagtttgggagcacagagggggccgaaatgcggcccgggtgccgtggctctcgacaaacactacagcaagtgacccttaggttagatgggaggtgggaccggcaggctgcacagccccctgcttctgggtatgcctggcagccagctgggtgggccggggcgtgggctgtctctggtttatccggcggtttgctgcgcccctactatgcgccaccctgggagggttgggcttaggggcctgggagtggcccggggggaggagggcgccccacctccagcccaggaggggcctgccagggcctgcccctcggccgccgagtcagcaccaagcagccccggaaatcccacggaggccagcgcgggggaggagctgtgatgaaagatggggccccgggtgggtgtgggccgagcccaggggaccctggccggcaggggtggggacctggctggcgtggggccggggcttcctggaggaggggaacgaaaccgccacctccggaggcgtgtaccgtgtgtcgggcgcacagtggggcttcagcactcggggactttttattgccaagactttgtggcccccgccgggggtgctctggctgggcccggcctcccctctcccacctcggaggcagggtcttcggccctttccttaggggaggcctccaggaggcctaggtgggggcattggcgcagggcgtggccggcaggtggcttgtgttcctggagtgagggcgtgggtcagttgtctcagagcgagtttagtttccagggcgagggcagggccttgccctgggtgggtggggggaccggcccctccatcatttcctggcccccagcccctgggagtcagccctgccgggcatccttaggccaggactgcagccctctctgggccccggcattctcatctgtaaaacgcggccacagtcctctcacgggggctttccttggctgacatcaccccgggcctcgctgctttgagggagggcctcagtgatatttaggggggaacaggggcccaagagagggtcccaggctggagagggcagagactgggacccccggacccaacctggaactgggatcttcacactggcggggacctgcaggaggtcgctgagccacctggattattttgggcccatcctccaggccccaggaaagacacctcccagccactccagagcggggaccctggtcacccgaggggaggaacggcccagcaggccagggatagccatcttggggcgttggtggcctgggtcagaggtctccccccatgctggggtgggtaggagggcccgggcccgtctgatccggagctccatctgctcacacgctccccgcggcccagggccagacggcagatggtggcagggggtggacaccaccaaaggggactcctcggaggcttcccagggccgagccttgggtggggtcgctcccctcctaccctccctgctcccagcagccacatctgagcccaccgccccaccacaggccttagagtagacgggggtgctgagcagctgggccctgggccgaggctggaaggagggaaggaaggcgggtggaggggcctggggagcgtggtggcactgagcaagctcacaaaggcctctgtgtcgcctggcagctcaggccccgcgctgagggccctgggctttgggtccggctggaccgacaccatgcctcccttgtggggcctggctcaagcccgtcggcgtcagagcctgcctgagctgctgggctgggggacaggagggtctggtggcccggaggaggccatgaaaggcccagctcaggccctctccccaggggccttgcccaggggctctggcccgagagccaccggccggcctggaggaatgtgagctgtgctgggtgactcggggccgccaggggctcccaggagagggcggaggggtggggacaggggccagagggttgcacaagctccgagtgggtggatgagtcacagccgaggggaaggcggaaaaaagggagggggagaaaggggtgggacagacacagtccccccagggcccggcgctgcccgaaacctctgcccatttgacagatagggagactgaggcccagagagggccaaggccttggctggggctgaacagctcagctggggtggctgagagttggggaggggctgccaggcagtcctgtgggcaggcaggaggtggacaggggttcccccggctccctgctcctcctgggctgtagcccggtctctgttactcacagccagggctgagccctatgctgggggctctgaggggcaggaaggggtttagcctgcggagtcactggccctgtccggacggggcacacccacggtggccttgacctcagctgggtttcggcactgggtccccgtgcctgggctgccacaccccttcctgctgactcagagcccccctgaaaagaaccaggcctgaccaggaggcaggagtcagggttggggaggccaaggggtcggctcttaggtccactctgggtttgagtttggacgcaactgtgtcctcatggtggggcctcgggcaagtggcctcagctcacgacggagtgggtgctgccggtggggttcgggtggaactggcgggaagtaggtgttatgtgttgttgttattgtttttttttttttttttggagacgagtctcgctctgtcaccagactggagtgctgtggcgtgatctaggtggctcactgcagcctccacctcctggttcaagtgattctcctgcctcagcctcccgagtagctgggactataggcccgcgccaccaggcccagctaattttttgttagaaatggggtttcaccatgttgcccaggatggtctcaatctcttgacctcatgatccacccaccttggcctctcaaagtgctgggattaccggcgtgagccaccgcgtctggccatagtaggtgttttgtaaaggtcactgcgtggcctcccctctgtatcggccgaagcccgtgctcagatcaacaggaaaatggctcagatcagggcacttctctcgagctactgcgtcctcctgtagcgcctcagagtgccctttccttatttatttatttttccaacacggagtttcgctcttgttgcccaggctggagtacaatggcgcaatctcaccgcaacccccgcctcccgggttcaagcgattctcctgcctcagcctcccgagtagctgggattacaggcacgcgccaccacacctggctaattttgtatttttagtagagacgagatttcaccatgttggtcaggctggtcttgaactccagaccttaggtgatccgcctgccttggcttcccaaagtgctgggattatagatgtgagccacagtgcccagccctttttttttttctttttctttttctttttttttttttttcagaccgagtctcgctgtgttgcccaggctggagtacggtggctccatccaggttcaccacaaccttcgcctcccgggttcaagcgattcttctgcctcagcgtcctgagtagctgggattacaggcacgcgccaccacgcctggctgatttttttttttaagacggagtctcgctctgtggcccaggcaggagtgcagtggtgcaatctcggctcactgcaacctccaccccccaggttcaagcgattctcccgcctcagcctcccgagtagctgggattacaggcacgtgccatcacgcccatctatttttgtatttttagtagagacagagtttcactgtgtcagccaggatggtctcgatctcctgacctggtgatctgcccgcctcggcctcccaaagtgctgggattacaggtgtgagccaccacacccagcctaatttttgtatttttagtagagacagggtttcaccatgttggccaggctggtcgctggtcttgaactcctgacctcaagtgatctgcccacctcagcctccccaaaatgctagaattacaggcgtgagcaccgagccgggcctcaaagtgccctttcaacaggcattcccgggggccctcctcggaggggtggtgccagtgtgcttgtgaaatttaagcgtccagtgtgggttttgccagcctcatctcacgctgatgagacagaacagggcatctgactgctcttgggcacagctagggaaactgaggctgatggggggcaggaaacctgactgtcctcatgcacagctggggaaattgaggctgggggcaggacagctggccgcccttgtgtacagatgggaaacaggttgggagtgggacacctgattgccttcctgtacagctggggaaactgaggctggggacatgacgtctgattgcttttgtgtacagctggggaaacaggctgggggaggcaggacatctgaccattctcatgcacagctggggaaactgaggctagaggataggacatttgactgcacttgggaacagctggggaaactgaggctggggagccgggacatctggctatcctcatgcacagatggaaaacagtcttggccgggtgccgtggttcatgcctgtaatcttagcaccttgggaggcaggggcggttggatcatttgaggccagggttttttgatttgttttgtttttttgagatggagtcttgctctgttgcccaggctggagtgcagtggcgtgatctcagctcactgcaagctctgcctcctgggttcatgccattctcctgcctcagcctcccgagtagctggaactacaggcccccgccaacacgcccggctaattttttgtattttttagtagagacggggtttcactgtgttagccaggatggtctccatcccctgacctcatgatctgcctgtctcggcctcccaaagtgctgggattacaggcgtgagccaccgcgccaggccgaggccaggggtttgagaccagcctggccaacatggtgatagcctgtctctgtattaaagacacacaaaaaagaaaagaggctggaggcagggcatgtatcgctttggtgcacagctggggaagctggggctggaaaggcgcgacatctgaccgccttcacgtgcaggtgggaatgtgaggctgggggagcagggtggaacgctgcttctcaagggcctcgggcccttgtcagtgggcacaggaacccccgcacccccactcacgagcgccctctccttccccactgctgcaggtctcggcgcggaagatggccggcggcgtggacggccccatcgggatcccgttccccgaccacagcagcgacatcctgagtgggctgaacgagcagcggacgcagggcctgctgtgcgacgtggtgatcctggtggagggccgcgagttccccacgcaccgctcggtgctggccgcctgcagccagtacttcaagaagctgttcacgtcgggcgccgtggtggaccagcagaacgtgtacgagatcgacttcgtcagcgccgaggcgctcaccgcgctcatggacttcgcctacacggccacgctcaccgtcagcacagccaacgtgggtgacatcctcagcgccgcccgcctgctggagatccccgccgtgagccacgtgtgcgccgacctcctggaccggcagatcctggcggccgacgcgggcgccgacgccgggcagctggaccttgtagatcaaattgatcagcgcaacctcctccgcgccaaggagtacctcgagttcttccagagcaaccccatgaacagcctgccccccgcggccgccgccgccgctgccagcttcccgtggtccgcctttggggcgtccgatgatgacctggatgccaccaaggaggccgtggccgccgctgtggccgccgtggccgcgggcgactgcaacggcttagacttctatgggccgggccccccggccgagcggcccccgacgggggacggggacgagggcgacagcaacccgggtctgtggccagagcgggatgaggacgcccccaccgggggtctctttccgccgccggtggccccgccggccgccacgcagaacggccactacggccgcggcggagaggaggaggccgcctcgctgtcggaggcggcccccgagccgggcgactctccgggcttcctgtcgggagcggccgagggcgaggacggggacgggcccgacgtggacgggctggcggccagcacgctgctgcagcagatgatgtcatcggtgggccgggcgggggccgcggcgggggacagcgacgaggagtcgcgggccgacgacaagggcgtcatggactactacctgaagtacttcagcggcgcccacgacggcgacgtctacccggcctggtcgcagaaggtggagaagaagatccgagccaaggccttccagaagtgccccatctgcgagaaggtcatccagggcgccggcaagctgccgcgacacatccgcacccacacgggcgagaagccctacgagtgcaacatctgcaaggtccgcttcaccaggtgagctgcccgccgcgggggaggcgccgtcctgctctctgccccagcatccgccgctcacgacccctcccgcctctctccctgcaccgcacgcacacatgcacgcagacgcacacatacacgcacgtgcacacagacacgtacacgcacagacacatgcacgtcacctacacatccacacacacgcagacacacatacacgcacttgcacatatatacgcacatgcacacacatgcacagacgcgtatgccacgtacacatgcacacacacagacgcacacacgcacacgcacaccacatacacatacagacatgctacacagacacatgcagacacagatgcacaccacatacacatcacatacacatgcacgcacacacacgcacaccgacatgcgcgcacacacacgcacaccacatacacatcacatacacatgcacgcacgcacgcacgcacacacgcacacccaggcacgcacacagatgcacacgcacccccagacatgcatgcaggcacatgcacacagacacgtacatgcgcacacatacatgcacatgcatgcaaacatgcacccacagacacacatatatgcacacacacgcaaacagacacaccccacctcttgggcccaaagccaacgaacgcttccctgacccacgtggctgttaagaacagcctagaccaggccctgcccttgtgggtggacatcccggtgggtgacagcacaggccagacataagatgacagccacatcatatgcaaagcgtgccggacagggttgagctgcgggaggtgggcgggaaggcacagtcgttcttccttcctggagggctggttcttctcttctgcacttttggatttttttctttttctgctttgggagagggtgacaggccctcaggcttagggagggacagcccaggccgtggagcggcttctgagtttcccgtgagcctgggtcatttgcttcaatcagccaacatttatgaagcgtctgctggtgccaggcctgttctaggcgccggggacaggccttgccggaacctgaaggaggggaggagcagctgtgggaaagggcgttccaggcagagggaacagccagtgcagaggccctgaggccagctcagcttgagagatcactgtgcccccctgggagccacaggacttggtccctaaacagcaggagttcaaggccaggcccgggcagtttgcaattcggtctcaggagtccagaggtggctggctgggcctcgtagatccggggcgggctgtagcggtgggggcagggggctggcaggcagggacctggccaggctgggtgactcagcaccaccccctgccccccgcccgccctggggttcccccagccacgcccaccgaggctgaagaaagaggccattgtcccagcttcccaaccccaccccgtggggacaggaactgggactgacccctccccagcaccccggccccctccccagcaggccaggagaggaaggtgcggcctggactccggcgcccaggagtgccaggcagggggcaaagggcactttgggaggcaggcagtgtagctggtggtttgtccctccttggtgaggttggggtactggaggtcttggggggctcctcttcctccaggcaggggtcactgtgggttcgtctctgagctcaggaagagcagcttggtggggtgcagagaactggggtctgcagaggggaccaggctgagcgaaggtggtgacccccaccctgcctccctggccgcaggccacaggcccggtttcattctgactcgggcactgctggctatcccacccgacccggggctgatcccctcagtcagagaaactgaggcttagagagggacaattgtggagacctcttcctcccaccccaatttagacccacctgcttcctcttttcccccaccccgtgctctggtcccccctccccaggacaccagcacctccaccctccaaaagcctgggagcccgaggcccctctgagtcacagcagggcgttgagtaagtggggcctgtggtggccggggctataattacccaggctggggctcggggtgatgaaactagggatacctccgcccccaccccgcctctgcgtggccctctggcctgctgtgcagctccaggcaagtcccttcctctctctgggcctcccaggctcatctggggagtctctgcacggttctagaaaaacctagtggctgccatcccctctgtgaccccggccctgtgccagatctgggcaaggcagcccggagaccttgccgtgggctttgcagaaggtgatcagtaaaccagaggcctggaggctggtaacagacctggttaggccagggttctgttagcaagttaccacgttctgttggcttcagtggggcagcaaggctagagataaggtaggggtctggttgccaagggccaggccttgaccctcagggcaacagagccaaggaggggttaaagttagggacaccagctctgtagctggtgccagagggagggacttagggctggaggaacccagaggggagccaggtctttgggaattaggaaaggtagaggggcattcaaggtagggctttgagggatgagtaggagtttgccagtccccacactaaagaagtcttcagtctattgagtgtgagaaggaagaaacccgaggtggctcagatgtggggcacaacaggcagcagcaaggagtaggtcaggttctagccagggctcttgagacccagggctccctcctgccctccggatcccaggaaggagtacactttattactatagattggcatcactcaatgggaataggcaagacacctacttttttttttttttttttttttttttttgagacgagtcttgctctgtcgcccaggctggagtgcagtggcacgatctcagctcactgcaacctccacctcccaggttcaagcgattctcctgcctcagcttcccaagtagctgggattataggcgcccaccaccatgccggctaatttttgtatttttagtagagacggggtttcaccacgttggccaggctggtctcgaactcctgacctcaggtgatctgcccgccttagcctcccaaagcgctggggttacaggtgtgagccaccatgcccggccagcaagccacttacatatttttacattttctgacagccccgttcaaaaaaagtcaaagagagttggtgaaagtgacttgaaacattttacctaacccagtagatgcatttccatgtgtagtcaatgtgcacgatcctcattgagccattttacatcaccttttgcatatcaagtcttcaaaagctggggtaccttttgcacttccagcgcacatcagttcagagtggccacattccaagggttcaggagccacctaggccacaggcaccccactgatatggtgaccggctttgtaggctagaggctccaggctaagctgggtccacgctgcccccatggggcgagacaggcagggaggggccctcaagtcacacccaacccctgccttctcggggctcacaatccaatcagggagacagaggagaaacaaggaaatcaacagaaacaagagagaccggccgggcgcggtggctcacgcctgtaatcccagcactttgggaggccgaggcaggcggatcacttgaggtcaggagttcaagaccagcccagccaacatggtgaaaaccctgtctccattaaaaatacaaaaatcagccaggtgtggtggcgcacgcctgtaatcccagcgtttggggaggccgaggcgggtggatcacctgaggtcaggagtccgagaccagcccggccaacatggtgaaaccccgtctctactaaaaatacaaaaatgagccaggtgtggtggcagagggcctgtaatcccagctacttgggaggctgaggcagaagaattgcttgaacccgggagacggaagttgcagtgagcggagaccacaccactgcgctcaagcctggaagatagagcgagactcggtctcagaaaaaaaaacaatagaagagtcaggtggtgatgacaggaggatggagacagggctggggaaggaggtgacatttgagcccaaatttgactgtgaagatccaggaggaaaaaagaaagtaccccggactgcgggagcagcacatgcaaaggccccagcgtagcttgtgctttgcacctttgcacgtcagggtggagcccagataggggagtgacgctgaagtgaggggagagtgggcagtcctgggtgtcgtggggtggggacttggttactagggtgaccaactgccccactttgtcccggacagaggggtttcccaggatgcaggactttcagtgctaaaaccagaacagttggtcaccctatctgtcaccaaacacctcggccgccgccagcctcgagagggcagggatgtttgcctgtcttgttccttgcggtattttcagcacctggaacagggcctggccctcagcgggcgctcggcaaaggtctgtggcatgaatgaaggcaccaggcactggctggcctcatcctaccccaggggtaggggcaggatggagtggcagaagcccactgtctccttctgtggtagggaaaggggttcatggcgggcgcagtggctcacacctgtaatcctagagctttgagaggccgaggcaagaggatcacttgagcccaggagtttgagattagcctgggtaacgtagctcaacccccatctctcaaacttacatatatatatatatatatatatatatatatatatatatatacacacacacacacacacacatatagtttaatagctatttaatagggtgtggtggtgcgtgtgctactctggaggatgaggcaggacgatggcttgagcccaggagttcgaggctgcagggaaccgtgatcacgccactgccctccagcctgggggacaaagccagaccctgcctctctttttttttttttttggagacagtctcattctgtcaccgaggttggagggcagtggcgtgatctgggctcactgcaacctccacctcccaagtagctgggattataggcctgcgccaccacgcctggcagatttgttttttgagacggagtttcgctcttaaaaagtgaaatttttttttttgagacggagtttcactgcaacctccacctcccagatacaagtgatcctcctgcctcagccttcctaatagctggcattacgggcgcctgctaccatgcccggctgatttttgttttttgtttttttgttttttgtttttttagtagagacagggtttcaccgtgtcgatcaggctggtctcgaactcctggcctcaagtgatccgcccgcctcggcctcccaaagtgctgggatttcaggcctgagcctccgcgcctggcctagactttgtctcttaaaaagttaaaaaaggaaaggaaacggggttcagagaggcatagcgttttcccaaggccacacagcactcagggtccgaggccctctttagatgttcagaatgcgaaatcgcccccactcgtctcgtttttcgagggaccgtccccatcggggcaccgaaacctctggtgcacggtccgtgttctgcaagggtgatgatccagggcctgccgtgtccgtgagggtccctgggcggggatcgggggtccccggccccactgaccgtgcccgccccgtgccccgtccacaggcaggacaagctgaaggtgcacatgcggaagcacacgggcgagaagccgtacctgtgccagcagtgcggcgccgcctttgcccacaactacgacctgaagaaccacatgcgcgtgcacacgggcctgcgcccctaccagtgcgacagctgctgcaagaccttcgtccgctccgaccacctgcacagacacctcaagaaagacggctgcaacggcgtcccctcgcgccgcggccgcaagccccgcgtccggggcggggcgcccgaccccagcccgggggccaccgcgacccccggcgcccccgcccagcccagctcccccgacgcccggcgcaacggccaggagaagcactttaaggacgaggacgaggacgaggacgtggccagccccgacggcttgggccggttgaatgtagcgggcgccggtggaggaggtgacagcggaggtggccccggggccgccaccgacggtaacttcacagccggactcgcctaaaaaccaaaaagagaaaacagaaacccgagaaagagagagacagagagagagaaaaaaaatcacccaccacccccccaaaaacacaaaaaaagaaaatctatctatatacagatatctatatctatatatatatatacagatatatatatatgacgcgtcacagaatctagggtagcgctttctcagatttccctcctttctgacgtttttctccctccgcaggggccccggccctccctggctccccttccccccaccaccccatcgctgggtttcggggcttggtttggggttttttgtaggacacaaggaatccgagaccccgcacagccccctgggcacccggcatggggcctggggcccgatccgaggccctgggctggggggagggtagacgtgggggcgctggggggggactggggtgggcttttaatttcctcccctcgctggtttctatgagtctttcagacaagaccttaaatgatttctgtctgctctgagcggacgttaaaatgggcccccgtcccccgacccgcaccctccttcctcagggcacttactaagggaggggtctccctctccatctccccagtggcctccccgcctccaaccctgcctgcggcctccccccgtcgcccaccccacgtctcctggccactgagacacaaacctatttatttctaggcctggagaaaggagatcggactggggttcccggtggggcgccaggatggctcctgggggtgctcctgccgccttccttcacggcacttacaaccggcgggacccccagggaccacccctcagggcgcccccccacccccgcccggtccacctagacccccacgtttggagattcaaaacttctgtcttcgtcctctcccccgagccccctctcccaaatttttaaagcactttttagatttttttttctctttcctccttaaaaacaaaatttatatatagatatatatatatatataaataatatacttttcctcagaggagcaggcaacagtgtgggataaacagagtcacgatcagaggaaccccagggtctggtgatggcagggatggggggagagagagaaaatccacaaattccaatgtcacaaaagcaataaaacaaactagaaaaaaaaaaggttttacaaaatgaaaggaaggaaaaaaaaaaaggcaaccaaccacattagaagtcttggcactttgtaacggaacgggtactacactttatcttaattcttaatttaaaaacatgtttacaagttacaaccaacttctatgaaaagttgaaaagacaaaaaaaaaaaaaaaaagcgagcgagagagagagcgagagagagagcgagagcagaagaaattcctaaaagtcgatttatttttgtacaaaataataaaaaaaaaaacccaccacaaacgtagaatccacttctgttccccaaaaagcgagaaggggggttcaggaggaagccatcgcaggggacctgggagacgccccgaggtgtttgtgcttcacccccagacgtcagcctcgaaggcaggactgtggggtgttcgtgctgtgttccccccgctccccctttctgtccccttttttggttctgacgtgaagaggtcttagcgcccgcttctgtccacggggtctctccttcctcctccctagctcagggatgggccttccagccggagcaccccgatccccatccggcaccccccaatcccccaacacgcctgtccctcccgcatggccaccaaggagctggaccttggatgcgcctaccctgctgaggtgggtgacaggggccccccacctccagggccttagaaccaccgcccctctccccaccccaggcacccctctttttactcaaaggcactgactgtaatccagggggactgggacctgcctccccccaacctctggctcccacaaggcccggtgttgaccgagccacaggccacggacaggggccggggttggggagactatgtcgccagatgccaggacgccctcaccccgtttgcatatgcaatgctagcatgggaccccgaaaatagacgctctgctgcactgagacttcttgtcaatgcccaaccggcgggggggtgtctccctgcccccgacccccccatacccccttctctgtgacacacacatcttctcgtctctttttctttcattgttaaagggaagctttttaagaaggcaattttcatattgtttctacaggatggttttggttcccttcccttcccacccccccttaagcctgtcagccccctccaaatgtctcaggatcccccctctcccctggggctgggtgacagcaccccggctgcgttcacaccccagtgtcacagggcgagctgttctggagagaaaaccatctgtcgtggctgagcggggagcttgaacacccaggccagggacacccctccccagctcccagagaggccccctgaggggtgagccctctttccaccttcccctatccatgcaccccctcgcaataaaaccaactctaaaatcacagctgtcgtcctagccagtgggggcgaccggacttggggggtggagccctctgggacttccgtaggaacaagggctgcggcccaccgcgacacttacacagacctcggggattgcactaaaccctcgttcctagctccgcactcagcttcgcctgtcctgcccgcccactttgccttaactacccgcccgtcctgggggccacagcctctgcatgggcccagagccgggacccccccagcccagccccgccctccccagactccgcgcaatcacatactgtatatagacgtgaatcgattttatttttattctttaaattaaggtcgtgataaagtgttgccaaagatacctgctgaattctcgcgtttcaggaaacaaacaaacaaaaaaaaatgatatttgaggagggtcgtgttgactccatatgaaaggacacagctcaaagcttttttgtttggttgtttggggttttttgtgttttctttttttggggtgttttttttttaactgcctggtacaaaaaaaaaaagagaaaaaaaaaaaagaaaaacaatgcgaaattgttatttccattctcatggtgaagttgcgtggacgcgtgtgtgcgtgtgtgcaagagagcgggagtgaggtccaggctggggttggggggcttcaggcgggggcgcccgggggccggggaggtggccgggccggagcccccgtctgcagtgccccccagcctgccgggcccaggagagagagagaagcatctttgctactagctgttgctgctacctgcctctgccccccgacgccccccgccttttgagattaaggaaaaaaaaaaaaagtcaaaaaagtttttaaaaatgaaaaaaaaaaattataaaccagtgaatgtaaaatgccggagcaggcccggcctggcatgggtgtggacctgcagccaggcaggctcgagcgggcgataccaaagtctgcccccccaccattgtggccatgcagtcctgtcactgtctttttgcttccttccgaggggggtcccccagcctcttccagggtcttcccctggaagtgggcggctgcagggaaggtgggggacaggggtctttgcacgattcagaccccggggccgtggcaggagcggtcacctcacaggtggtgacactgaggcaggggcctcggggtgccccctcccgcccggcaaccagaatggttggaggcaagacagagagaatgaaaggaaaaacagaagaaaaaaaaatattaaaaaccaacaaaaaaagcaaaaatcctattttttgagaaagaaagatatttatatttgcagttttattttaaaaagttatttaagttgaagcagccttcctggaggtgggggggggggggtggtgggtggctggcgcaggacgggtcaggggcctggaggctgggggtgccccaggagctacaacctcagagttaagactagctcgcattaaatacatagatttacggggggggggggggggggccgggcccagggggtggagggggccagggagacccccatccctcgccggggctgcctggaggctgtggaccaggatccgatgcccaggtcccgccccccaccccaccccaggcccagaatcgaggtgccttggactttggaggggccaggcctggtgaatggggggcggggcggcgccctcagggtacagagcacagacagatagacattccagagactgtattgagagtctttataaagtgtgggagatttaaaaaaaaaaaaaactgataaaaatgcactttttgggagtggggagggagaagctttaaaagtaataaaaaacaaacaaaaacacaaaagatgaaaaaacaaaaaaattcatttttcttgtacataaaaaaaaaaaaagaaccactaaacgcagcctgttacgaccgctgccgcctcagtcgcctcatttgatgttctctgtgttttgttcgggggaggctggggagcggggatggggggcttggggggggtcccccttttccccttttggccctgaagagactgggtgggttgagcacctcgtccacaccacacctttgggcccagggtgaccggatcctgggtcccaaggagagaagccccaggtccccgacccttcctgctcttcctgcccggccttggaagccaggcccatctctctggggtccgtctgtcgcgtggcagagaggctgggtgtggatggtgacccagagcaccggggtgggggtgagtgtccgaggagtacccaggtccagaggcccctcttgcggggaaggtgacccatagcccctggcgcgggcaggcagctggcacaggataaggccagaggggcagcagggagaaccggccgggcgagttgtcagcagaatccagggctgggccctgggcaccactggctccaggctttcccgaggccccaggcggggtagcctcacctgggggccacctgactctgctagaggaccccagggtgctgccccatgccaggccccagggacatgagcca

SEQ ID NO: 859 - skipped

SEQ ID NO: 860 - RNA, 17 nt, synthetic construct
  source 1..17: mol_type = other RNA
ccccacagggcagtaac

SEQ ID NO: 861 - RNA, 17 nt, synthetic construct
  source 1..17: mol_type = other RNA
gagtatccagtgaggcc

SEQ ID NO: 862 - RNA, 17 nt, synthetic construct
  source 1..17: mol_type = other RNA
gtcaaggcaaggctggc

SEQ ID NO: 863 - RNA, 17 nt, synthetic construct
  source 1..17: mol_type = other RNA
cattgagatagtgtggg

SEQ ID NO: 864 - RNA, 17 nt, synthetic construct
  source 1..17: mol_type = other RNA
agatagtgtggggaagg

SEQ ID NO: 865 - RNA, 17 nt, synthetic construct
  source 1..17: mol_type = other RNA
ctggagcctgtgataaa

SEQ ID NO: 866 - RNA, 17 nt, synthetic construct
  source 1..17: mol_type = other RNA
gccttgtcaaggctatt

SEQ ID NO: 867 - RNA, 17 nt, synthetic construct
  source 1..17: mol_type = other RNA
ccttgtcaaggctattg

SEQ ID NO: 868 - RNA, 17 nt, synthetic construct
  source 1..17: mol_type = other RNA
gccagccttgccttgac

SEQ ID NO: 869 - RNA, 17 nt, synthetic construct
  source 1..17: mol_type = other RNA
gcattgagatagtgtgg

SEQ ID NO: 870 - RNA, 20 nt, synthetic construct
  source 1..20: mol_type = other RNA
ccgttactgccctgtggggc

SEQ ID NO: 871 - RNA, 20 nt, synthetic construct
  source 1..20: mol_type = other RNA
cttctgacacaactgtgttc

SEQ ID NO: 872 - RNA, 20 nt, synthetic construct
  source 1..20: mol_type = other RNA
aggttgctagtgaacacagt

SEQ ID NO: 873 - RNA, 20 nt, synthetic construct
  source 1..20: mol_type = other RNA
gggcaaggtgaacgtggatg

SEQ ID NO: 874 - RNA, 20 nt, synthetic construct
  source 1..20: mol_type = other RNA
acacaactgtgttcactagc

SEQ ID NO: 875 - RNA, 20 nt, synthetic construct
  source 1..20: mol_type = other RNA
ttcactagcaacctcaaaca

SEQ ID NO: 876 - RNA, 20 nt, synthetic construct
  source 1..20: mol_type = other RNA
tttgaggttgctagtgaaca

SEQ ID NO: 877 - RNA, 20 nt, synthetic construct
  source 1..20: mol_type = other RNA
actcctgaggagaagtctgc

SEQ ID NO: 878 - RNA, 20 nt, synthetic construct
  source 1..20: mol_type = other RNA
aagctagtctagtgcaagct

SEQ ID NO: 879 - RNA, 20 nt, synthetic construct
  source 1..20: mol_type = other RNA
gtgcaagctaacagttgctt

SEQ ID NO: 880 - RNA, 20 nt, synthetic construct
  source 1..20: mol_type = other RNA
gcctctgattagggtggggg

SEQ ID NO: 881 - RNA, 20 nt, synthetic construct
  source 1..20: mol_type = other RNA
attagggtgggggcgtgggt

SEQ ID NO: 882 - RNA, 20 nt, synthetic construct
  source 1..20: mol_type = other RNA
tcacaggctccaggaagggt

SEQ ID NO: 883 - RNA, 20 nt, synthetic construct
  source 1..20: mol_type = other RNA
ataaaagcaactgttagctt

SEQ ID NO: 884 - RNA, 20 nt, synthetic construct
  source 1..20: mol_type = other RNA
ccccacccacgcccccaccc

SEQ ID NO: 885 - RNA, 20 nt, synthetic construct
  source 1..20: mol_type = other RNA
gccagggaccgtttcagaca

SEQ ID NO: 886 - RNA, 20 nt, synthetic construct
  source 1..20: mol_type = other RNA
tctgaaacggtccctggcta

SEQ ID NO: 887 - RNA, 20 nt, synthetic construct
  source 1..20: mol_type = other RNA
ccttgtcaaggctattggtc

SEQ ID NO: 888 - RNA, 20 nt, synthetic construct
  source 1..20: mol_type = other RNA
aaacggtccctggctaaact

SEQ ID NO: 889 - RNA, 20 nt, synthetic construct
  source 1..20: mol_type = other RNA
gggaaggggcccccaagagg

SEQ ID NO: 890 - RNA, 20 nt, synthetic construct
  source 1..20: mol_type = other RNA
agactattggtcaagtttgc

SEQ ID NO: 891 - RNA, 20 nt, synthetic construct
  source 1..20: mol_type = other RNA
cattgagatagtgtggggaa

SEQ ID NO: 892 - RNA, 20 nt, synthetic construct
  source 1..20: mol_type = other RNA
aaaaaaattaagcagcagta

SEQ ID NO: 893 - RNA, 20 nt, synthetic construct
  source 1..20: mol_type = other RNA
tcacagcccaagatagttaa

SEQ ID NO: 894 - RNA, 37 nt, synthetic construct
  source 1..37: mol_type = other RNA
attgctccttacgaggagacgaagctagtctagtgca

SEQ ID NO: 895 - skipped

SEQ ID NO: 896 - protein, 26 aa, synthetic construct
GSGGSPAGSPTSTEEGTSESATPGSG

SEQ ID NO: 897 - protein, 36 aa, synthetic construct
SDLYIERGGDPRDVHQQVETKPKGKRKSEIRILKIR

SEQ ID NO: 898 - protein, 31 aa, synthetic construct
SDYIVDHGGDPEKVFFETKSKKDKTKRYKRR

SEQ ID NO: 899 - protein, 5 aa, synthetic construct
GSGGS

SEQ ID NO: 900 - protein, 6 aa, synthetic construct
GGSGGS

SEQ ID NO: 901 - protein, 4 aa, synthetic construct
GGGS

SEQ ID NO: 902 - protein, 4 aa, synthetic construct
GGSG

SEQ ID NO: 903 - protein, 5 aa, synthetic construct
GGSGG

SEQ ID NO: 904 - protein, 5 aa, synthetic construct
GSGSG

SEQ ID NO: 905 - protein, 5 aa, synthetic construct
GSGGG

SEQ ID NO: 906 - protein, 5 aa, synthetic construct
GGGSG

SEQ ID NO: 907 - protein, 5 aa, synthetic construct
GSSSG

SEQ ID NO: 908 - protein, 6 aa, synthetic construct
HHHHHH

SEQ ID NO: 909 - DNA, 40 bp, unidentified
  source 1..40: mol_type = unassigned DNA
aaacccttcctggagcctgtgataaaagcaactgttagct
